(19) United States
(12) Patent Application Publication
(10) Pub. No.: US 2026/0125474 A1
(43) Pub. Date: May 7, 2026

(54) Anti-CTLA-4 Binding Proteins and Methods of Use Thereof

(71) Applicant: GigaGen, Inc., San Carlos, CA (US)

(72) Inventors: David Scott Johnson, San Francisco, CA (US); Adam Shultz Adler, Belmont, CA (US); Rena Aviva Mizrahi, Pacifica, CA (US); Yoong Wearn Lim, Pacifica, CA (US); Michael Asensio, Mountain View, CA (US); Erica Lyn Stone, San Bruno, CA (US)

(21) Appl. No.: 19/312,203

(22) Filed: Aug. 27, 2025

Related U.S. Application Data
(62) Division of application No. 17/418,776, now Pat. No. 12,421,311.
(60) Provisional application No. 62/785,659, filed on Dec. 27, 2018.

(51) Int. Cl. C07K 16/28; A61K 39/00; A61P 35/00

(52) U.S. Cl. CPC C07K 16/2818; A61P 35/00; A61K 2039/505; C07K 2317/33; C07K 2317/622; C07K 2317/73; C07K 2317/76; C07K 2317/92

(57) ABSTRACT

Provided herein are antigen-binding proteins (ABPs) that selectively bind to CTLA-4 and its isoforms and homologs, and compositions comprising the ABPs. Also provided are methods of using the ABPs, such as therapeutic and diagnostic methods.

### 1. CROSS REFERENCE TO RELATED APPLICATIONS

[0001] This application is a divisional of U.S. application Ser. No. 17/418,776, filed Jun. 25, 2021, which is the National Stage of International Application No PCT/US2019/068820, filed Dec. 27, 2019, which claims priority to and the benefit of U.S. Provisional Patent Application No. 62/785,659, filed on Dec. 27, 2018, the entire contents of which are incorporated by reference herein.

### 2. SEQUENCE LISTING

[0002] The instant application contains a Sequence Listing with 11998 sequences which has been submitted via Patent Center and is hereby incorporated by reference in its entirety. Said XML copy, created on Aug. 27, 2025, is named64214US_CRF_sequencelisting.xml, and is 6,261,602 bytes in size.

### 3. FIELD

[0003] Provided herein are antigen-binding proteins (ABPs) with binding specificity for CTLA-4 and compositions comprising such ABPs, including pharmaceutical compositions, diagnostic compositions, and kits. Also provided are methods of making CTLA-4 ABPs, and methods of using CTLA-4 ABPs, for example, for therapeutic purposes, diagnostic purposes, and research purposes.

### 4. BACKGROUND

[0004] CTLA-4, also known as cytotoxic T-lymphocyte associated protein 4 and CD152 (cluster of differentiation 152), is a cell surface receptor that suppresses T cell inflammatory activity. CTLA-4 is constitutively expressed by regulatory T cells (Tregs) and upregulated in stimulated T cells. CD80 and CD86, also expressed in antigen presenting cells (APCs) such as dendritic cells (DCs), are the primary ligands of CTLA-4. The interaction between CTLA-4 and its ligands is vitally important for downregulating the immune responses and promoting self-tolerance by suppressing T cell inflammatory activity. This activity prevents autoimmune diseases, as well as prevents the immune system from killing cancer cells.

[0005] CTLA-4 is a member of the immunoglobulin superfamily that is expressed by activated T cells and transmits an inhibitory signal to T cells. CTLA-4 binds CD80 and CD86 with greater affinity and avidity than CD28 thus enabling it to outcompete CD28 for its ligands. CTLA-4 transmits an inhibitory signal to T cells, whereas CD28 transmits a stimulatory signal. CTLA-4 is also found in regulatory T cells (Tregs) and contributes to their inhibitory function. T cell activation through the T cell receptor and CD28 leads to increased expression of CTLA-4. The mechanism by which CTLA-4 acts in T cells remains somewhat controversial. Biochemical evidence suggested that CTLA-4 recruits a phosphatase to the T cell receptor (TCR), thus attenuating the signal. This work remains unconfirmed in the literature since its first publication. More recent work has suggested that CTLA-4 may function in vivo by capturing and removing B7-1 and B7-2 from the membranes of antigen-presenting cells, thus making these unavailable for triggering of CD28.

[0006] Variants in CTLA-4 have been associated with insulin-dependent diabetes mellitus, Graves' disease, Hashimoto's thyroiditis, celiac disease, systemic lupus erythematosus, thyroid-associated orbitopathy, primary biliary cirrhosis and other autoimmune diseases. The comparatively high binding affinity of CTLA-4 for CD80 and CD86 has made it a potential therapy for autoimmune diseases. Soluble fusion proteins of CTLA-4 and antibodies (CTLA-4-Ig) have been used in clinical trials for rheumatoid arthritis.

[0007] Tumor cells suppress anti-tumor immune response through various mechanisms, including up-regulation of Tregs. Recently, CTLA-4 inhibitors have been shown to antagonize binding of CTLA-4 to its ligands, thereby activating the immune system to attack tumors. CTLA-4 antibodies have also been used to induce antibody-dependent cell-mediated cytotoxicity (ADCC) of Tregs specific to the tumor microenvironment, thus reducing immune tolerance to the tumor. CTLA-4 antibodies have been therefore used with varying success to treat some types of cancer.

[0008] Thus, there is a need for developing CTLA-4 ABPs that can be used for treatment, diagnosis, and research of various diseases, including cancer and autoimmune disease.

### 5. SUMMARY

[0009] Provided herein are novel ABPs with binding specificity for CTLA-4 and methods of using such ABPs. The CTLA-4 is a human CTLA-4 (SEQ ID: 7001) or a fragment of the human CTLA-4.

[0010] The ABP can comprise an antibody. In some embodiments, the antibody is a monoclonal antibody. In some embodiments, the antibody is a chimeric antibody. In some embodiments, the antibody is a humanized antibody. In some embodiments, the antibody is a human antibody. In some embodiments, the ABP comprises an antibody fragment. In some embodiments, the ABP comprises an alternative scaffold. In some embodiments, the ABPs comprises a single-chain variable fragment (scFv).

[0011] The ABPs provided herein can induce various biological effects associated with inhibition or activation of CTLA-4. In some embodiments, an ABP provided herein prevents binding between CTLA-4 and its ligands. In some embodiments, an ABP provided herein prevents inhibition of an effector T cell by a Treg. In some embodiments, the ABP directly kills or induces killing of Tregs or other CTLA-4-expressing cells in the tumor microenvironment by ADCC and/or ADCP, for example mediated by binding of NK cell-expressed CD16 to the ABP Fc domain. In some embodiments, the ABP inhibits the suppression of an effector T cell by a regulatory T cell by directly killing Tregs. In some embodiments, the tissue is a tumor. In some embodiments, the ABP activates CTLA-4, leading to Treg expansion and activation.

[0012] Also provided are kits comprising one or more of the pharmaceutical compositions comprising the ABPs, and instructions for use of the pharmaceutical composition.

[0013] Also provided are isolated polynucleotides encoding the ABPs provided herein, and portions thereof.

[0014] Also provided are vectors comprising such polynucleotides.

[0015] Also provided are recombinant host cells comprising such polynucleotides and recombinant host cells comprising such vectors.

[0016] Also provided are methods of producing the ABP using the polynucleotides, vectors, or host cells provided herein.

[0017] Also provided are pharmaceutical compositions comprising the ABPs and a pharmaceutically acceptable excipient.

[0018] Also provided are methods of treating or preventing a disease or condition in a subject in need thereof, comprising administering to the subject an effective amount of an ABP provided herein, or a pharmaceutical composition comprising such ABP. In some aspects, the disease or condition is a cancer or autoimmune disease. In some aspects, the disease or condition is a viral or bacterial infection. In some aspects the method further comprises administering one or more additional therapeutic agents. In some aspects, the additional therapeutic agent is an immune stimulatory agent.

[0019] More specifically, the present disclosure provides an isolated antigen binding protein (ABP) that specifically binds a human cytotoxic T-lymphocyte associated protein 4 (CTLA-4), comprising: (a) a CDR3-L having a sequence selected from SEQ ID NOS: 3001-3028 and a CDR3-H having a sequence selected from SEQ ID NOS: 6001-6028; or (b) a CDR3-L having a sequence selected from SEQ ID NOS: 9984-10479 and a CDR3-H having a sequence selected from SEQ ID NOS: 11472-11967; or (c) a CDR3-L having a sequence of the CD3-L of any one of the clones in the library deposited under ATCC Accession No. PTA-125512 and a CDR3-L having a sequence of the CD3-L of any one of the clones in the library deposited under ATCC Accession No. PTA-125512. In some embodiments, the CDR3-L and the CDR3-H are a cognate pair.

[0020] In some embodiments, the ABP comprises (a) a CDR1-L having a sequence selected from SEQ ID NOS: 1001-1028 and a CDR2-L having a sequence selected from SEQ ID NOS: 2001-2028; and a CDR1-H having a sequence selected from SEQ ID NOS: 4001-4028; and a CDR2-H having a sequence selected from SEQ ID NOS: 5001-5028; or (b) a CDR1-L having a sequence selected from SEQ ID NOS: 8992-9487; and a CDR2-L having a sequence selected from SEQ ID NOS: 9488-9983; and a CDR1-H having a sequence selected from SEQ ID NOS: 10480-10975; and a CDR2-H having a sequence selected from SEQ ID NOS: 10976-11471; or (c) a CDR1-L having a sequence selected from a CDR1-L of any one of the clones in the library deposited under ATCC Accession No. PTA-125512; and a CDR2-L having a sequence selected from a CDR2-L of any one of the clones in the library deposited under ATCC Accession No. PTA-125512; and a CDR1-H having a sequence selected from a CDR1-H of any one of the clones in the library deposited under ATCC Accession No. PTA-125512; and a CDR2-H having a sequence selected from a CDR2-H of any one of the clones in the library deposited under ATCC Accession No. PTA-125512;

[0021] In some embodiments, the ABP comprises a CDR1-L, a CDR2-L, a CDR3-L, a CDR1-H, a CDR2-H and a CDR3-H, wherein the CDR1-L consists of SEQ ID NO: 1001, the CDR2-L consists of SEQ ID NO: 2001, the CDR3-L consists of SEQ ID NO: 3001, the CDR1-H consists of SEQ ID NO: 4001, the CDR2-H consists of SEQ ID NO: 5001 and the CDR3-H consists of SEQ ID NO: 6001; or the CDR1-L consists of SEQ ID NO: 1002, CDR2-L consists of SEQ ID NO: 2002, the CDR3-L consists of SEQ ID NO: 3002, the CDR1-H consists of SEQ ID NO: 4002, the CDR2-H consists of SEQ ID NO: 5002 and the CDR3-H consists of SEQ ID NO: 6002; or the CDR1-L consists of SEQ ID NO: 1003, the CDR2-L consists of SEQ ID NO: 2003, the CDR3-L consists of SEQ ID NO: 3003, the CDR1-H consists of SEQ ID NO: 4003, the CDR2-H consists of SEQ ID NO: 5003 and the CDR3-H consists of SEQ ID NO: 6003; or the CDR1-L consists of SEQ ID NO: 1004, the CDR2-L consists of SEQ ID NO: 2004, the CDR3-L consists of SEQ ID NO: 3004, the CDR1-H consists of SEQ ID NO: 4004, the CDR2-H consists of SEQ ID NO: 5004 and the CDR3-H consists of SEQ ID NO: 6004; or the CDR1-L consists of SEQ ID NO: 1005, the CDR2-L consists of SEQ ID NO: 2005, the CDR3-L consists of SEQ ID NO: 3005, the CDR1-H consists of SEQ ID NO: 4005, the CDR2-H consists of SEQ ID NO: 5005 and the CDR3-H consists of SEQ ID NO: 6005; or the CDR1-L consists of SEQ ID NO: 1006, the CDR2-L consists of SEQ ID NO: 2006, the CDR3-L consists of SEQ ID NO: 3006, the CDR1-H consists of SEQ ID NO: 4006, the CDR2-H consists of SEQ ID NO: 5006 and the CDR3-H consists of SEQ ID NO: 6006; or the CDR1-L consists of SEQ ID NO: 1007, the CDR2-L consists of SEQ ID NO: 2007, the CDR3-L consists of SEQ ID NO: 3007, the CDR1-H consists of SEQ ID NO: 4007, the CDR2-H consists of SEQ ID NO: 5007 and the CDR3-H consists of SEQ ID NO: 6007; or the CDR1-L consists of SEQ ID NO: 1008, the CDR2-L consists of SEQ ID NO: 2008, the CDR3-L consists of SEQ ID NO: 3008, the CDR1-H consists of SEQ ID NO: 4008, the CDR2-H consists of SEQ ID NO: 5008 and the CDR3-H consists of SEQ ID NO: 6008 or the CDR1-L consists of SEQ ID NO: 1009, the CDR2-L consists of SEQ ID NO: 2009, the CDR3-L consists of SEQ ID NO: 3009, the CDR1-H consists of SEQ ID NO: 4009, the CDR2-H consists of SEQ ID NO: 5009 and the CDR3-H consists of SEQ ID NO: 6009; or the CDR1-L consists of SEQ ID NO: 1010, the CDR2-L consists of SEQ ID NO: 2010, the CDR3-L consists of SEQ ID NO: 3010, the CDR1-H consists of SEQ ID NO: 4010, the CDR2-H consists of SEQ ID NO: 5010 and the CDR3-H consists of SEQ ID NO: 6010; or the CDR1-L consists of SEQ ID NO: 1011, the CDR2-L consists of SEQ ID NO: 2011, the CDR3-L consists of SEQ ID NO: 3011, the CDR1-H consists of SEQ ID NO: 4011, the CDR2-H consists of SEQ ID NO: 5011 and the CDR3-H consists of SEQ ID NO: 6011; or the CDR1-L consists of SEQ ID NO: 1012, the CDR2-L consists of SEQ ID NO: 2012, the CDR3-L consists of SEQ ID NO: 3012, the CDR1-H consists of SEQ ID NO: 4012, the CDR2-H consists of SEQ ID NO: 5012 and the CDR3-H consists of SEQ ID NO: 6012; or the CDR1-L consists of SEQ ID NO: 1013, the CDR2-L consists of SEQ ID NO: 2013, the CDR3-L consists of SEQ ID NO: 3013, the CDR1-H consists of SEQ ID NO: 4013, the CDR2-H consists of SEQ ID NO: 5013 and the CDR3-H consists of SEQ ID NO: 6013; or the CDR1-L consists of SEQ ID NO: 1014, the CDR2-L consists of SEQ ID NO: 2014, the CDR3-L consists of SEQ ID NO: 3014, the CDR1-H consists of SEQ ID NO: 4014, the CDR2-H consists of SEQ ID NO: 5014 and the CDR3-H consists of SEQ ID NO: 6014; or the CDR1-L consists of SEQ ID NO: 1015, the CDR2-L consists of SEQ ID NO: 2015, the CDR3-L consists of SEQ ID NO: 3015, the CDR1-H consists of SEQ ID NO: 4015, the CDR2-H consists of SEQ ID NO: 5015 and the CDR3-H consists of SEQ ID NO: 6015; or the CDR1-L consists of SEQ ID NO: 1016, the CDR2-L consists of SEQ ID NO: 2016, the CDR3-L consists of SEQ ID NO: 3016, the CDR1-H consists of SEQ ID NO: 4016, the CDR2-H consists of SEQ ID NO: 5016 and the CDR3-H consists of SEQ ID NO: 6016; or the CDR1-L consists of SEQ ID NO: 1017, the CDR2-L consists of SEQ ID NO: 2017, the CDR3-L consists of SEQ ID NO: 3017, the CDR1-H consists of SEQ ID NO: 4017, the CDR2-H consists of SEQ ID NO: 5017 and the CDR3-H consists of SEQ ID NO: 6017; or the CDR1-L consists of SEQ ID NO: 1018, the CDR2-L consists of SEQ ID NO: 2018, the CDR3-L consists of SEQ ID NO: 3018, the CDR1-H consists of SEQ ID NO: 4018, the CDR2-H consists of SEQ ID NO: 5018 and the CDR3-H consists of SEQ ID NO: 6018; or the CDR1-L consists of SEQ ID NO: 1019, the CDR2-L consists of SEQ ID NO: 2019, the CDR3-L consists of SEQ ID NO: 3019, the CDR1-H consists of SEQ ID NO: 4019, the CDR2-H consists of SEQ ID NO: 5019 and the CDR3-H consists of SEQ ID NO: 6019; or the CDR1-L consists of SEQ ID NO: 1020, the CDR2-L consists of SEQ ID NO: 2020, the CDR3-L consists of SEQ ID NO: 3020, the CDR1-H consists of SEQ ID NO: 4020, the CDR2-H consists of SEQ ID NO: 5020 and the CDR3-H consists of SEQ ID NO: 6020; or the CDR1-L consists of SEQ ID NO: 1021, the CDR2-L consists of SEQ ID NO: 2021, the CDR3-L consists of SEQ ID NO: 3021, the CDR1-H consists of SEQ ID NO: 4021, the CDR2-H consists of SEQ ID NO: 5021 and the CDR3-H consists of SEQ ID NO: 6021; or the CDR1-L consists of SEQ ID NO: 1022, the CDR2-L consists of SEQ ID NO: 2022, the CDR3-L consists of SEQ ID NO: 3022, the CDR1-H consists of SEQ ID NO: 4022, the CDR2-H consists of SEQ ID NO: 5022 and the CDR3-H consists of SEQ ID NO: 6022; or the CDR1-L consists of SEQ ID NO: 1023, the CDR2-L consists of SEQ ID NO: 2023, the CDR3-L consists of SEQ ID NO: 3023, the CDR1-H consists of SEQ ID NO: 4023, the CDR2-H consists of SEQ ID NO: 5023 and the CDR3-H consists of SEQ ID NO: 6023; or the CDR1-L consists of SEQ ID NO: 1024, the CDR2-L consists of SEQ ID NO: 2024, the CDR3-L consists of SEQ ID NO: 3024, the CDR1-H consists of SEQ ID NO: 4024, the CDR2-H consists of SEQ ID NO: 5024 and the CDR3-H consists of SEQ ID NO: 6024; or the CDR1-L consists of SEQ ID NO: 1025, the CDR2-L consists of SEQ ID NO: 2025, the CDR3-L consists of SEQ ID NO: 3025, the CDR1-H consists of SEQ ID NO: 4025, the CDR2-H consists of SEQ ID NO: 5025 and the CDR3-H consists of SEQ ID NO: 6025; or the CDR1-L consists of SEQ ID NO: 1026, the CDR2-L consists of SEQ ID NO: 2026, the CDR3-L consists of SEQ ID NO: 3026, the CDR1-H consists of SEQ ID NO: 4026, the CDR2-H consists of SEQ ID NO: 5026 and the CDR3-H consists of SEQ ID NO: 6026; or the CDR1-L consists of SEQ ID NO: 1027, the CDR2-L consists of SEQ ID NO: 2027, the CDR3-L consists of SEQ ID NO: 3027, the CDR1-H consists of SEQ ID NO: 4027, the CDR2-H consists of SEQ ID NO: 5027 and the CDR3-H consists of SEQ ID NO: 6027; or the CDR1-L consists of SEQ ID NO: 1028, the CDR2-L consists of SEQ ID NO: 2028, the CDR3-L consists of SEQ ID NO: 3028, the CDR1-H consists of SEQ ID NO: 4028, the CDR2-H consists of SEQ ID NO: 5028 and the CDR3-H consists of SEQ ID NO: 6028.

[0022] In some embodiments, the ABP comprises a variable light chain (V_{L}) comprising a sequence at least 97% identical to a sequence selected from SEQ ID NOS: 1-28 and a variable heavy chain (V_{H}) comprising a sequence at least 97% identical to a sequence selected from SEQ ID NOS: 101-128; or a variable light chain (V_{L}) comprising a sequence at least 97% identical to a sequence selected from SEQ ID NOS: 8000-8495 and a variable heavy chain (V_{H}) comprising a sequence at least 97% identical to a sequence selected from SEQ ID NOS: 8496-8991; or a variable light chain (V_{L}) comprising a sequence at least 97% identical to a V_{L} sequence of any one of the clones in the library deposited under ATCC Accession No. PTA-125512 and a variable heavy chain (V_{H}) comprising a sequence at least 97% identical to a V_{H} sequence of any one of the clones in the library deposited under ATCC Accession No. PTA-125512. In some embodiments, the V_{L} and the V_{H} are a cognate pair.

[0023] In some embodiments, the ABP comprises a variable light chain (V_{L}) comprising a sequence selected from SEQ ID NOS: 1-28 and a variable heavy chain (V_{H}) comprising a a sequence selected from SEQ ID NOS: 101-128 or a variable light chain (V_{L}) comprising a sequence selected from SEQ ID NOS: 8000-8495 and a variable heavy chain (V_{H}) comprising a sequence selected from SEQ ID NOS: 8496-8991; or a variable light chain (V_{L}) comprising a V_{L} sequence of any one of the clones in the library deposited under ATCC Accession No. PTA-125512 and a variable heavy chain (V_{H}) comprising a V_{H} sequence of any one of the clones in the library deposited under ATCC Accession No. PTA-125512. In some embodiments, the V_{L} and the V_{H} are a cognate pair.

[0024] In some embodiments, the ABP comprises an scFv or a full length monoclonal antibody. In some embodiments, the ABP comprises an immunoglobulin constant region.

[0025] In some embodiments, the ABP binds human CTLA-4 with a K_{D} of less than 500 nM, as measured by surface plasmon resonance. In some embodiments, the ABP binds human CTLA-4 with a K_{D} of less than 200 nM, as measured by surface plasmon resonance. In some embodiments, the ABP binds human CTLA-4 with a K_{D} of less than 25 nM, as measured by surface plasmon resonance. In some embodiments, the ABP binds to human CTLA-4 on a cell surface with a K_{D} of less than 25 nM.

[0026] Another aspect of the present disclosure provides a method of treating a disease comprising the step of: administering to a subject in need thereof an effective amount of the ABP disclosed herein or the pharmaceutical composition disclosed herein. In some embodiments, the disease is selected from the group consisting of cancer, AIDS, Alzheimer's disease and viral or bacterial infection. In some embodiments, the method further comprises the step of administering one or more additional therapeutic agents to the subject. In some embodiments, the additional therapeutic agent is selected from CTLA-4 inhibitor, TIGIT inhibitor, a chemotherapy agent, an immune-stimulatory agent, radiation, a cytokine, a polynucleotide encoding a cytokine and a combination thereof.

### 6. BRIEF DESCRIPTION OF THE DRAWINGS

[0027] FIG. 1 summarized the method of generating scFv libraries from B cells isolated from fully human mice and selecting a B cell expressing an antibody having high-affinity to the antigen. FIG. 1 discloses SEQ ID NOS 11971-11998, respectively, in order of appearance.

[0028] FIG. 2 illustrates scFv amplification procedure. First, a mixture of primers directed against the IgK C region, the IgG C region, and all V regions is used to separately amplify IgK and IgH. Second, the V-H and C-K primers contain a region of complementarity that results in the formation of an overlap extension amplicon that is a fusion product between IgK and IgH. The region of complementarity comprises a DNA sequence that encodes a Gly-Ser rich scFv linker sequence. Third, semi-nested PCR is performed to add adapters for Illumina sequencing or yeast display.

[0029] FIG. 3 includes a schematic for the monoclonal antibodies sorted in their epitope bins.

[0030] FIG. 4 includes plots from the histopathological staining of hCTLA-4 KI mice bearing MC38 tumors. The plots show scoring of H&E, immunoglobulin (Ig), and C3 stains from the right kidney. ipi is Ipilimumab, and CTLA4.A14.2a is antibody A14 cloned onto a mouse IgG2a backbone.

[0031] FIG. 5 includes a plot showing the alkaline phosphatase levels in treated hCTLA4 KI mice bearing MC38 tumors. IPI is Ipilimumab, and CTLA4.A14.2a is antibody A14 cloned onto a mouse IgG2a backbone. U/L is units per liter.

[0032] FIG. 6 includes plots for the percentages of intratumoral regulatory T cells (Treg) cells and intratumoral natural killer (NK) cells after the indicated treatments.

[0033] FIG. 7 includes a plot showing the changes in body weight of the hCTLA4 mice receiving the indicated treatments. Ipi is Ipilimumab, and CTLA4.A14.2a is antibody A14 cloned onto a mouse IgG2a backbone. Error bars represent+/−standard error of the mean.

[0034] FIG. 8 includes plots showing the influence of the control, Ipi and the anti-CTLA4 treatments on percentage of the indicated cell populations. Ipi is Ipilimumab, and CTLA4.A14.2a is antibody A14 cloned onto a mouse IgG2a backbone.

[0035] FIG. 9 includes plots showing the influence of the control, Ipi and the anti-CTLA4 treatments on percentage of the indicated cell populations. Ipi is Ipilimumab, and CTLA4.A14.2a is antibody A14 cloned onto a mouse IgG2a backbone.

[0036] FIG. 10 includes plots showing the influence of the control, Ipi and the anti-CTLA4 treatments on percentage of dendritic cells (DCs) and activated dendritic cells (CD86+). Ipi is Ipilimumab, and CTLA4.A14.2a is antibody A14 cloned onto a mouse IgG2a backbone.

[0037] FIG. 11 includes a plot showing the mean tumor volume after treatment with 0.3 mg/kg of the indicated anti-CTLA4s.

### 7. DETAILED DESCRIPTION

### 7.1. Definitions

[0038] Unless otherwise defined herein, scientific and technical terms used in connection with the present disclosure shall have the meanings that are commonly understood by those of ordinary skill in the art. Further, unless otherwise required by context, singular terms shall include pluralities and plural terms shall include the singular. Generally, nomenclatures used in connection with, and techniques of, cell and tissue culture, molecular biology, immunology, microbiology, genetics and protein and nucleic acid chemistry and hybridization described herein are those well-known and commonly used in the art. The methods and techniques of the present disclosure are generally performed according to conventional methods well known in the art and as described in various general and more specific references that are cited and discussed throughout the present specification unless otherwise indicated. See, e.g., Sambrook et al. Molecular Cloning: A Laboratory Manual, 2d ed., Cold Spring Harbor Laboratory Press, Cold Spring Harbor, N.Y. (1989) and Ausubel et al., Current Protocols in Molecular Biology, Greene Publishing Associates (1992), and Harlow and Lane Antibodies: A Laboratory Manual Cold Spring Harbor Laboratory Press, Cold Spring Harbor, N.Y. (1990), which are incorporated herein by reference. Enzymatic reactions and purification techniques are performed according to manufacturer's specifications, as commonly accomplished in the art or as described herein. The terminology used in connection with, and the laboratory procedures and techniques of, analytical chemistry, synthetic organic chemistry, and medicinal and pharmaceutical chemistry described herein are those well-known and commonly used in the art. Standard techniques can be used for chemical syntheses, chemical analyses, pharmaceutical preparation, formulation, and delivery, and treatment of patients.

[0039] The following terms, unless otherwise indicated, shall be understood to have the following meanings:

[0040] The terms “CTLA-4,” “CTLA-4 protein,” and “CTLA-4 antigen” are used interchangeably herein to refer to human CTLA-4, or any variants (e.g., splice variants and allelic variants), isoforms, and species homologs of human CTLA-4 that are naturally expressed by cells, or that are expressed by cells transfected with a ctla4 gene. In some aspects, the CTLA-4 protein is a CTLA-4 protein naturally expressed by a primate (e.g., a monkey or a human), a rodent (e.g., a mouse or a rat), a dog, a camel, a cat, a cow, a goat, a horse, or a sheep. In some aspects, the CTLA-4 protein is human CTLA-4 (hCTLA-4; SEQ ID NO: 7001).

[0041] The term “immunoglobulin” refers to a class of structurally related proteins generally comprising two pairs of polypeptide chains: one pair of light (L) chains and one pair of heavy (H) chains. In an “intact immunoglobulin,” all four of these chains are interconnected by disulfide bonds. The structure of immunoglobulins has been well characterized. See, e.g., Paul, Fundamental Immunology 7th ed., Ch. 5 (2013) Lippincott Williams & Wilkins, Philadelphia, PA. Briefly, each heavy chain typically comprises a heavy chain variable region (V_{H}) and a heavy chain constant region (C_{H}). The heavy chain constant region typically comprises three domains, abbreviated C_{H1}, C_{H2}, and C_{H3}. Each light chain typically comprises a light chain variable region (V_{L}) and a light chain constant region. The light chain constant region typically comprises one domain, abbreviated C_{L}.

[0042] The term “antigen-binding protein” (ABP) refers to a protein comprising one or more antigen-binding domains that specifically bind to an antigen or epitope. In some embodiments, the antigen-binding domain binds the antigen or epitope with specificity and affinity similar to that of naturally occurring antibodies. In some embodiments, the ABP comprises an antibody. In some embodiments, the ABP consists of an antibody. In some embodiments, the ABP consists essentially of an antibody. In some embodiments, the ABP comprises an alternative scaffold. In some embodiments, the ABP consists of an alternative scaffold. In some embodiments, the ABP consists essentially of an alternative scaffold. In some embodiments, the ABP comprises an antibody fragment. In some embodiments, the ABP consists of an antibody fragment. In some embodiments, the ABP consists essentially of an antibody fragment. A “CTLA-4 ABP,” “anti-CTLA-4 ABP,” or “CTLA-4-specific ABP” is an ABP, as provided herein, which specifically binds to the antigen CTLA-4. In some embodiments, the ABP binds the extracellular domain of CTLA-4. In certain embodiments, a CTLA-4 ABP provided herein binds to an epitope of CTLA-4 that is conserved between or among CTLA-4 proteins from different species.

[0043] The term “antibody” is used herein in its broadest sense and includes certain types of immunoglobulin molecules comprising one or more antigen-binding domains that specifically bind to an antigen or epitope. An antibody specifically includes intact antibodies (e.g., intact immunoglobulins), antibody fragments, and multi-specific antibodies. One example of an antigen-binding domain is an antigen-binding domain formed by a V_{H}-V_{L} dimer. An antibody is one type of ABP.

[0044] The term “alternative scaffold” refers to a molecule in which one or more regions may be diversified to produce one or more antigen-binding domains that specifically bind to an antigen or epitope. In some embodiments, the antigen-binding domain binds the antigen or epitope with specificity and affinity similar to that of naturally occurring antibodies. Exemplary alternative scaffolds include those derived from fibronectin (e.g., Adnectins™) the β-sandwich (e.g., iMab), lipocalin (e.g., Anticalins®), EETI-II/AGRP, BPTI/LACI-D1/ITI-D2 (e.g., Kunitz domains), thioredoxin peptide aptamers, protein A (e.g., Affibody®), ankyrin repeats (e.g., DARPins), gamma-B-crystallin/ubiquitin (e.g., Affilins), CTLD3 (e.g., Tetranectins), Fynomers, and (LDLR-A module) (e.g., Avimers). Additional information on alternative scaffolds is provided in Binz et al., Nat. Biotechnol., 2005 23:1257-1268; Skerra, Current Opin. in Biotech., 2007 18:295-304; and Silacci et al., J Biol. Chem., 2014, 289:14392-14398; each of which is incorporated by reference in its entirety. An alternative scaffold is one type of ABP.

[0045] The term “antigen-binding domain” means the portion of an ABP that is capable of specifically binding to an antigen or epitope.

[0046] The terms “full length antibody,” “intact antibody,” and “whole antibody” are used herein interchangeably to refer to an antibody having a structure substantially similar to a naturally occurring antibody structure and having heavy chains that comprise an Fc region.

[0047] The term “Fc region” means the C-terminal region of an immunoglobulin heavy chain that, in naturally occurring antibodies, interacts with Fc receptors and certain proteins of the complement system. The structures of the Fc regions of various immunoglobulins, and the glycosylation sites contained therein, are known in the art. See Schroeder and Cavacini, J. Allergy Clin. Immunol., 2010, 125:S41-52, incorporated by reference in its entirety. The Fc region may be a naturally occurring Fc region, or an Fc region modified as described elsewhere in this disclosure.

[0048] The V_{H} and V_{L} regions may be further subdivided into regions of hypervariability (“hypervariable regions (HVRs);” also called “complementarity determining regions” (CDRs)) interspersed with regions that are more conserved. The more conserved regions are called framework regions (FRs). Each V_{H} and V_{L} generally comprises three CDRs and four FRs, arranged in the following order (from N-terminus to C-terminus): FR1-CDR1-FR2-CDR2-FR3-CDR3-FR4. The CDRs are involved in antigen binding, and influence antigen specificity and binding affinity of the antibody. See Kabat et al., Sequences of Proteins of Immunological Interest 5th ed. (1991) Public Health Service, National Institutes of Health, Bethesda, MD, incorporated by reference in its entirety.

[0049] The light chain from any vertebrate species can be assigned to one of two types, called kappa (x) and lambda (k), based on the sequence of its constant domain.

[0050] The heavy chain from any vertebrate species can be assigned to one of five different classes (or isotypes): IgA, IgD, IgE, IgG, and IgM. These classes are also designated α, δ, ε, γ, and μ, respectively. The IgG and IgA classes are further divided into subclasses on the basis of differences in sequence and function. Humans express the following subclasses: IgG1, IgG2, IgG3, IgG4, IgA1, and IgA2.

[0051] The amino acid sequence boundaries of a CDR can be determined by one of skill in the art using any of a number of known numbering schemes, including those described by Kabat et al., supra (“Kabat” numbering scheme); A1-Lazikani et al., 1997, J. Mol. Biol., 273:927-948 (“Chothia” numbering scheme); MacCallum et al., 1996, J. Mol. Biol. 262:732-745 (“Contact” numbering scheme); Lefranc et al., Dev. Comp. Immunol., 2003, 27:55-77 (“IMGT” numbering scheme); and Honegge and Pluckthun, J. Mol. Biol., 2001, 309:657-70 (“AHo” numbering scheme); each of which is incorporated by reference in its entirety.

[0052] Table 1 provides the positions of CDR1-L (CDR1 of V_{L}), CDR2-L (CDR2 of V_{L}), CDR3-L (CDR3 of V_{L}), CDR1-H (CDR1 of V_{H}), CDR2-H (CDR2 of V_{H}), and CDR3-H (CDR3 of V_{H}), as identified by the Kabat and Chothia schemes. For CDR1-H, residue numbering is provided using both the Kabat and Chothia numbering schemes.

[0053] CDRs may be assigned, for example, using antibody numbering software, such as Abnum, available at www.bioinf.org.uk/abs/abnum/, and described in Abhinandan and Martin, Immunology, 2008, 45:3832-3839, incorporated by reference in its entirety.

TABLE 1
Residues in CDRs according to Kabat and Chothia numbering schemes.

| CDR | Kabat | Chothia |
|---|---|---|
| CDR1-L | 24-34 | 24-34 |
| CDR2-L | 50-56 | 50-56 |
| CDR3-L | 89-97 | 89-97 |
| CDR1-H (Kabat Numbering) | 31-35B | 26-32 or 34* |
| CDR1-H (Chothia Numbering) | 31-35 | 26-32 |
| CDR2-H | 50-65 | 52-56 |
| CDR3-H | 95-102 | 95-102 |

*The C-terminus of CDR1-H, when numbered using the Kabat numbering convention, varies between 32 and 34, depending on the length of the CDR.

[0054] The “EU numbering scheme” is generally used when referring to a residue in an antibody heavy chain constant region (e.g., as reported in Kabat et al., supra).

[0055] An “antibody fragment” comprises a portion of an intact antibody, such as the antigen-binding or variable region of an intact antibody. Antibody fragments include, for example, Fv fragments, Fab fragments, F(ab′)₂ fragments, Fab′ fragments, scFv (sFv) fragments, and scFv-Fc fragments.

[0056] “Fv” fragments comprise a non-covalently-linked dimer of one heavy chain variable domain and one light chain variable domain.

[0057] “Fab” fragments comprise, in addition to the heavy and light chain variable domains, the constant domain of the light chain and the first constant domain (C_{H1}) of the heavy chain.

[0058] Fab fragments may be generated, for example, by recombinant methods or by papain digestion of a full-length antibody.

[0059] “F(ab′)2” fragments contain two Fab′ fragments joined, near the hinge region, by disulfide bonds. F(ab′)2 fragments may be generated, for example, by recombinant methods or by pepsin digestion of an intact antibody. The F(ab′) fragments can be dissociated, for example, by treatment with ß-mercaptoethanol.

[0060] “Single-chain Fv” or “sFv” or “scFv” antibody fragments comprise a V_{H} domain and a V_{L} domain in a single polypeptide chain. The V_{H} and V_{L} are generally linked by a peptide linker. See Pluckthun A. (1994). In some embodiments, the linker is a (GGGGS)ₙ (SEQ ID NO: 11968). In some embodiments, n=1, 2, 3, 4, 5, or 6. See Antibodies from Escherichia coli. In Rosenberg M. & Moore G. P. (Eds.), The Pharmacology of Monoclonal Antibodies vol. 113 (pp. 269-315). Springer-Verlag, New York, incorporated by reference in its entirety. [0060]“scFv-Fc” fragments comprise an scFv attached to an Fc domain. For example, an Fc domain may be attached to the C-terminal of the scFv. The Fc domain may follow the V_{H} or V_{L}, depending on the orientation of the variable domains in the scFv (i.e., V_{H}-V_{L} or V_{L}-V_{H}). Any suitable Fc domain known in the art or described herein may be used. In some cases, the Fc domain comprises an IgG4 Fc domain.

[0061] The term “single domain antibody” refers to a molecule in which one variable domain of an antibody specifically binds to an antigen without the presence of the other variable domain. Single domain antibodies, and fragments thereof, are described in Arabi Ghahroudi et al., FEBS Letters, 1998, 414:521-526 and Muyldermans et al., Trends in Biochem. Sci., 2001, 26:230-245, each of which is incorporated by reference in its entirety.

[0062] A “monospecific ABP” is an ABP that comprises a binding site that specifically binds to a single epitope. An example of a monospecific ABP is a naturally occurring IgG molecule which, while divalent, recognizes the same epitope at each antigen-binding domain. The binding specificity may be present in any suitable valency.

[0063] The term “monoclonal antibody” refers to an antibody from a population of substantially homogeneous antibodies. A population of substantially homogeneous antibodies comprises antibodies that are substantially similar and that bind the same epitope(s), except for variants that may normally arise during production of the monoclonal antibody. Such variants are generally present in only minor amounts. A monoclonal antibody is typically obtained by a process that includes the selection of a single antibody from a plurality of antibodies. For example, the selection process can be the selection of a unique clone from a plurality of clones, such as a pool of hybridoma clones, phage clones, yeast clones, bacterial clones, or other recombinant DNA clones. The selected antibody can be further altered, for example, to improve affinity for the target (“affinity maturation”), to humanize the antibody, to improve its production in cell culture, and/or to reduce its immunogenicity in a subject.

[0064] The term “chimeric antibody” refers to an antibody in which a portion of the heavy and/or light chain is derived from a particular source or species, while the remainder of the heavy and/or light chain is derived from a different source or species.

[0065] “Humanized” forms of non-human antibodies are chimeric antibodies that contain minimal sequence derived from the non-human antibody. A humanized antibody is generally a human antibody (recipient antibody) in which residues from one or more CDRs are replaced by residues from one or more CDRs of a non-human antibody (donor antibody). The donor antibody can be any suitable non-human antibody, such as a mouse, rat, rabbit, chicken, or non-human primate antibody having a desired specificity, affinity, or biological effect. In some instances, selected framework region residues of the recipient antibody are replaced by the corresponding framework region residues from the donor antibody. Humanized antibodies may also comprise residues that are not found in either the recipient antibody or the donor antibody. Such modifications may be made to further refine antibody function. For further details, see Jones et al., Nature, 1986, 321:522-525; Riechmann et al., Nature, 1988, 332:323-329; and Presta, Curr. Op. Struct. Biol., 1992, 2:593-596, each of which is incorporated by reference in its entirety.

[0066] A “human antibody” is one which possesses an amino acid sequence corresponding to that of an antibody produced by a human or a human cell, or derived from a non-human source that utilizes a human antibody repertoire or human antibody-encoding sequences (e.g., obtained from human sources or designed de novo). Human antibodies specifically exclude humanized antibodies. In some embodiments, rodents are genetically engineered to replace their rodent antibody sequences with human antibodies.

[0067] An “isolated ABP” or “isolated nucleic acid” is an ABP or nucleic acid that has been separated and/or recovered from a component of its natural environment. Components of the natural environment may include enzymes, hormones, and other proteinaceous or nonproteinaceous materials. In some embodiments, an isolated ABP is purified to a degree sufficient to obtain at least 15 residues of N-terminal or internal amino acid sequence, for example by use of a spinning cup sequenator. In some embodiments, an isolated ABP is purified to homogeneity by gel electrophoresis (e.g., SDS-PAGE) under reducing or nonreducing conditions, with detection by Coomassie blue or silver stain. An isolated ABP includes an ABP in situ within recombinant cells, since at least one component of the ABP's natural environment is not present. In some aspects, an isolated ABP or isolated nucleic acid is prepared by at least one purification step. In some embodiments, an isolated ABP or isolated nucleic acid is purified to at least 80%, 85%, 90%, 95%, or 99% by weight. In some embodiments, an isolated ABP or isolated nucleic acid is purified to at least 80%, 85%, 90%, 95%, or 99% by volume. In some embodiments, an isolated ABP or isolated nucleic acid is provided as a solution comprising at least 85%, 90%, 95%, 98%, 99% to 100% ABP or nucleic acid by weight. In some embodiments, an isolated ABP or isolated nucleic acid is provided as a solution comprising at least 85%, 90%, 95%, 98%, 99% to 100% ABP or nucleic acid by volume.

[0068] “Affinity” refers to the strength of the sum total of non-covalent interactions between a single binding site of a molecule (e.g., an ABP) and its binding partner (e.g., an antigen or epitope). Unless indicated otherwise, as used herein, “affinity” refers to intrinsic binding affinity, which reflects a 1:1 interaction between members of a binding pair (e.g., ABP and antigen or epitope). The affinity of a molecule X for its partner Y can be represented by the dissociation equilibrium constant (K_{D}). The kinetic components that contribute to the dissociation equilibrium constant are described in more detail below. Affinity can be measured by common methods known in the art, including those described herein. Affinity can be determined, for example, using surface plasmon resonance (SPR) technology (e.g., BIACORE®) or biolayer interferometry (e.g., FORTEBIO®).

[0069] With regard to the binding of an ABP to a target molecule, the terms “bind,” “specific binding,” “specifically binds to,” “specific for,” “selectively binds,” and “selective for” a particular antigen (e.g., a polypeptide target) or an epitope on a particular antigen mean binding that is measurably different from a non-specific or non-selective interaction (e.g., with a non-target molecule). Specific binding can be measured, for example, by measuring binding to a target molecule and comparing it to binding to a non-target molecule. Specific binding can also be determined by competition with a control molecule that mimics the epitope recognized on the target molecule. In that case, specific binding is indicated if the binding of the ABP to the target molecule is competitively inhibited by the control molecule. In some aspects, the affinity of a CTLA-4 ABP for a non-target molecule is less than about 50% of the affinity for CTLA-4. In some aspects, the affinity of a CTLA-4 ABP for a non-target molecule is less than about 40% of the affinity for CTLA-4. In some aspects, the affinity of a CTLA-4 ABP for a non-target molecule is less than about 30% of the affinity for CTLA-4. In some aspects, the affinity of a CTLA-4 ABP for a non-target molecule is less than about 20% of the affinity for CTLA-4. In some aspects, the affinity of a CTLA-4 ABP for a non-target molecule is less than about 10% of the affinity for CTLA-4. In some aspects, the affinity of a CTLA-4 ABP for a non-target molecule is less than about 1% of the affinity for CTLA-4. In some aspects, the affinity of a CTLA-4 ABP for a non-target molecule is less than about 0.10% of the affinity for CTLA-4.

[0070] The term “k_{d}” (sec⁻¹), as used herein, refers to the dissociation rate constant of a particular ABP-antigen interaction. This value is also referred to as the k_{off} value.

[0071] The term “kₐ” (M⁻¹×sec⁻¹), as used herein, refers to the association rate constant of a particular ABP-antigen interaction. This value is also referred to as the kₒₙ value.

[0072] The term “K_{D}” (M), as used herein, refers to the dissociation equilibrium constant of a particular ABP-antigen interaction. K_{D}=k_{d}/kₐ.

[0073] The term “K_{A}” (M⁻¹), as used herein, refers to the association equilibrium constant of a particular ABP-antigen interaction. K_{A}=kₐ/k_{d}.

[0074] An “affinity matured” ABP is one with one or more alterations (e.g., in one or more CDRs or FRs) that result in an improvement in the affinity of the ABP for its antigen, compared to a parent ABP which does not possess the alteration(s). In one embodiment, an affinity matured ABP has nanomolar or picomolar affinity for the target antigen. Affinity matured ABPs may be produced using a variety of methods known in the art. For example, Marks et al. (Bio/Technology, 1992, 10:779-783, incorporated by reference in its entirety) describes affinity maturation by V_{H} and V_{L} domain shuffling. Random mutagenesis of CDR and/or framework residues is described by, for example, Barbas et al. (Proc. Nat. Acad. Sci. U.S.A., 1994, 91:3809-3813); Schier et al., Gene, 1995, 169:147-155; Yelton et al., J Immunol., 1995, 155:1994-2004; Jackson et al., J Immunol., 1995, 154:3310-33199; and Hawkins et al, J Mol. Biol., 1992, 226:889-896; each of which is incorporated by reference in its entirety.

[0075] An “immunoconjugate” is an ABP conjugated to one or more heterologous molecule(s).

[0076] “Effector functions” refer to those biological activities mediated by the Fc region of an antibody, which activities may vary depending on the antibody isotype. Examples of antibody effector functions include C1q binding to activate complement dependent cytotoxicity (CDC), Fc receptor binding to activate antibody-dependent cellular cytotoxicity (ADCC), and antibody dependent cellular phagocytosis (ADCP).

[0077] When used herein in the context of two or more ABPs, the term “competes with” or “cross-competes with” indicates that the two or more ABPs compete for binding to an antigen (e.g., CTLA-4). In one exemplary assay, CTLA-4 is coated on a surface and contacted with a first CTLA-4 ABP, after which a second CTLA-4 ABP is added. In another exemplary assay, a first CTLA-4 ABP is coated on a surface and contacted with CTLA-4, and then a second CTLA-4 ABP is added. If the presence of the first CTLA-4 ABP reduces binding of the second CTLA-4 ABP, in either assay, then the ABPs compete. The term “competes with” also includes combinations of ABPs where one ABP reduces binding of another ABP, but where no competition is observed when the ABPs are added in the reverse order. However, in some embodiments, the first and second ABPs inhibit binding of each other, regardless of the order in which they are added. In some embodiments, one ABP reduces binding of another ABP to its antigen by at least 25%, at least 50%, at least 60%, at least 70%, at least 80%, at least 85%, at least 90%, or at least 95%. A skilled artisan can select the concentrations of the antibodies used in the competition assays based on the affinities of the ABPs for CTLA-4 and the valency of the ABPs. The assays described in this definition are illustrative, and a skilled artisan can utilize any suitable assay to determine if antibodies compete with each other. Suitable assays are described, for example, in Cox et al., “Immunoassay Methods,” in Assay Guidance Manual [Internet], Updated Dec. 24, 2014 (www.ncbi.nlm.nih.gov/books/NBK92434/; accessed Sep. 29, 2015); Silman et al., Cytometry, 2001, 44:30-37; and Finco et al., J. Pharm. Biomed. Anal., 2011, 54:351-358; each of which is incorporated by reference in its entirety.

[0078] The term “epitope” means a portion of an antigen the specifically binds to an ABP. Epitopes frequently consist of surface-accessible amino acid residues and/or sugar side chains and may have specific three dimensional structural characteristics, as well as specific charge characteristics. Conformational and non-conformational epitopes are distinguished in that the binding to the former but not the latter may be lost in the presence of denaturing solvents. An epitope may comprise amino acid residues that are directly involved in the binding, and other amino acid residues, which are not directly involved in the binding. The epitope to which an ABP binds can be determined using known techniques for epitope determination such as, for example, testing for ABP binding to CTLA-4 variants with different point-mutations, or to chimeric CTLA-4 variants.

[0079] Percent “identity” between a polypeptide sequence and a reference sequence, is defined as the percentage of amino acid residues in the polypeptide sequence that are identical to the amino acid residues in the reference sequence, after aligning the sequences and introducing gaps, if necessary, to achieve the maximum percent sequence identity. Alignment for purposes of determining percent amino acid sequence identity can be achieved in various ways that are within the skill in the art, for instance, using publicly available computer software such as BLAST, BLAST-2, ALIGN, MEGALIGN (DNASTAR), CLUSTALW, CLUSTAL OMEGA, or MUSCLE software. Those skilled in the art can determine appropriate parameters for aligning sequences, including any algorithms needed to achieve maximal alignment over the full length of the sequences being compared.

[0080] A “conservative substitution” or a “conservative amino acid substitution,” refers to the substitution an amino acid with a chemically or functionally similar amino acid. Conservative substitution tables providing similar amino acids are well known in the art. By way of example, the groups of amino acids provided in TABLES 2-4 are, in some embodiments, considered conservative substitutions for one another.

TABLE 2
Selected groups of amino acids that are
considered conservative substitutions for
one another, in certain embodiments.

| | |
|---|---|
| Acidic Residues | D and E |
| Basic Residues | K, R, and H |
| Hydrophilic Uncharged Residues | S, T, N, and Q |
| Aliphatic Uncharged Residues | G, A, V, L, and I |
| Non-polar Uncharged Residues | C, M, and P |
| Aromatic Residues | F, Y, and W |

TABLE 3
Additional selected groups of amino acids
that are considered conservative substitutions
for one another, in certain embodiments.

| | |
|---|---|
| Group 1 | A, S, and T |
| Group 2 | D and E |
| Group 3 | N and Q |
| Group 4 | R and K |
| Group 5 | I, L, and M |
| Group 6 | F, Y, and W |

TABLE 4
Further selected groups of amino acids
that are considered conservative substitutions
for one another, in certain embodiments.

| | |
|---|---|
| Group A | A and G |
| Group B | D and E |
| Group C | N and Q |
| Group D | R, K, and H |
| Group E | I, L, M, V |
| Group F | F, Y, and W |
| Group G | S and T |
| Group H | C and M |

[0081] Additional conservative substitutions may be found, for example, in Creighton, Proteins: Structures and Molecular Properties 2nd ed. (1993) W. H. Freeman & Co., New York, NY. An ABP generated by making one or more conservative substitutions of amino acid residues in a parent ABP is referred to as a “conservatively modified variant.”

[0082] The term “treating” (and variations thereof such as “treat” or “treatment”) refers to clinical intervention in an attempt to alter the natural course of a disease or condition in a subject in need thereof. Treatment can be performed both for prophylaxis and during the course of clinical pathology. Desirable effects of treatment include preventing occurrence or recurrence of disease, alleviation of symptoms, diminish of any direct or indirect pathological consequences of the disease, preventing metastasis, decreasing the rate of disease progression, amelioration or palliation of the disease state, and remission or improved prognosis.

[0083] As used herein, the term “therapeutically effective amount” or “effective amount” refers to an amount of an ABP or pharmaceutical composition provided herein that, when administered to a subject, is effective to treat a disease or disorder.

[0084] As used herein, the term “subject” means a mammalian subject. Exemplary subjects include humans, monkeys, dogs, cats, mice, rats, cows, horses, camels, goats, rabbits, and sheep. In certain embodiments, the subject is a human. In some embodiments the subject has a disease or condition that can be treated with an ABP provided herein. In some aspects, the disease or condition is a cancer. In some aspects, the disease or condition is a viral infection.

[0085] The term “package insert” is used to refer to instructions customarily included in commercial packages of therapeutic or diagnostic products (e.g., kits) that contain information about the indications, usage, dosage, administration, combination therapy, contraindications and/or warnings concerning the use of such therapeutic or diagnostic products.

[0086] The term “cytotoxic agent,” as used herein, refers to a substance that inhibits or prevents a cellular function and/or causes cell death or destruction.

[0087] A “chemotherapeutic agent” refers to a chemical compound useful in the treatment of cancer. Chemotherapeutic agents include “anti-hormonal agents” or “endocrine therapeutics” which act to regulate, reduce, block, or inhibit the effects of hormones that can promote the growth of cancer.

[0088] The term “cytostatic agent” refers to a compound or composition which arrests growth of a cell either in vitro or in vivo. In some embodiments, a cytostatic agent is an agent that reduces the percentage of cells in S phase. In some embodiments, a cytostatic agent reduces the percentage of cells in S phase by at least about 20%, at least about 40%, at least about 60%, or at least about 80%.

[0089] The term “tumor” refers to all neoplastic cell growth and proliferation, whether malignant or benign, and all pre-cancerous and cancerous cells and tissues. The terms “cancer,” “cancerous,” “cell proliferative disorder,” “proliferative disorder” and “tumor” are not mutually exclusive as referred to herein. The terms “cell proliferative disorder” and “proliferative disorder” refer to disorders that are associated with some degree of abnormal cell proliferation. In some embodiments, the cell proliferative disorder is a cancer.

[0090] The term “pharmaceutical composition” refers to a preparation which is in such form as to permit the biological activity of an active ingredient contained therein to be effective in treating a subject, and which contains no additional components which are unacceptably toxic to the subject.

[0091] The terms “modulate” and “modulation” refer to reducing or inhibiting or, alternatively, activating or increasing, a recited variable.

[0092] The terms “increase” and “activate” refer to an increase of 10%, 20%, 30%, 40%, 50%, 60%, 70%, 75%, 80%, 85%, 90%, 95%, 100%, 2-fold, 3-fold, 4-fold, 5-fold, 10-fold, 20-fold, 50-fold, 100-fold, or greater in a recited variable.

[0093] The terms “reduce” and “inhibit” refer to a decrease of 10%, 20%, 30%, 40%, 50%, 60%, 70%, 75%, 80%, 85%, 90%, 95%, 2-fold, 3-fold, 4-fold, 5-fold, 10-fold, 20-fold, 50-fold, 100-fold, or greater in a recited variable.

[0094] The term “agonize” refers to the activation of receptor signaling to induce a biological response associated with activation of the receptor. An “agonist” is an entity that binds to and agonizes a receptor.

[0095] The term “antagonize” refers to the inhibition of receptor signaling to inhibit a biological response associated with activation of the receptor. An “antagonist” is an entity that binds to and antagonizes a receptor.

[0096] The term “effector T cell” includes T helper (i.e., CD4+) cells and cytotoxic (i.e., CD8+) T cells. CD4+ effector T cells contribute to the development of several immunologic processes, including maturation of B cells into plasma cells and memory B cells, and activation of cytotoxic T cells and macrophages. CD8+ effector T cells destroy virus-infected cells and tumor cells. See Seder and Ahmed, Nature Immunol., 2003, 4:835-842, incorporated by reference in its entirety, for additional information on effector T cells.

[0097] The term “regulatory T cell” includes cells that regulate immunological tolerance, for example, by suppressing effector T cells. In some aspects, the regulatory T cell has a CD4+CD25+Foxp3+ phenotype. In some aspects, the regulatory T cell has a CD8+CD25+ phenotype. See Nocentini et al., Br. J. Pharmacol., 2012, 165:2089-2099, incorporated by reference in its entirety, for additional information on regulatory T cells.

[0098] The term “dendritic cell” refers to a professional antigen-presenting cell capable of activating a naïve T cell and stimulating growth and differentiation of a B cell.

[0099] A “variant” of a polypeptide (e.g., an antibody) comprises an amino acid sequence wherein one or more amino acid residues are inserted into, deleted from and/or substituted into the amino acid sequence relative to the native polypeptide sequence, and retains essentially the same biological activity as the native polypeptide. The biological activity of the polypeptide can be measured using standard techniques in the art (for example, if the variant is an antibody, its activity may be tested by binding assays, as described herein). Variants of the present disclosure include fragments, analogs, recombinant polypeptides, synthetic polypeptides, and/or fusion proteins.

[0100] A “derivative” of a polypeptide is a polypeptide (e.g., an antibody) that has been chemically modified, e.g., via conjugation to another chemical moiety such as, for example, polyethylene glycol, albumin (e.g., human serum albumin), phosphorylation, and glycosylation. Unless otherwise indicated, the term “antibody” includes, in addition to antibodies comprising two full-length heavy chains and two full-length light chains, derivatives, variants, fragments, and muteins thereof, examples of which are described below.

[0101] A nucleotide sequence is “operably linked” to a regulatory sequence if the regulatory sequence affects the expression (e.g., the level, timing, or location of expression) of the nucleotide sequence. A “regulatory sequence” is a nucleic acid that affects the expression (e.g., the level, timing, or location of expression) of a nucleic acid to which it is operably linked. The regulatory sequence can, for example, exert its effects directly on the regulated nucleic acid, or through the action of one or more other molecules (e.g., polypeptides that bind to the regulatory sequence and/or the nucleic acid). Examples of regulatory sequences include promoters, enhancers and other expression control elements (e.g., polyadenylation signals). Further examples of regulatory sequences are described in, for example, Goeddel, 1990, Gene Expression Technology: Methods in Enzymology 185, Academic Press, San Diego, CA and Baron et al., 1995, Nucleic Acids Res. 23:3605-06.

[0102] A “host cell” is a cell that can be used to express a nucleic acid, e.g., a nucleic acid of the present disclosure. A host cell can be a prokaryote, for example, E. coli, or it can be a eukaryote, for example, a single-celled eukaryote (e.g., a yeast or other fungus), a plant cell (e.g., a tobacco or tomato plant cell), an animal cell (e.g., a human cell, a monkey cell, a hamster cell, a rat cell, a mouse cell, or an insect cell) or a hybridoma. Examples of host cells include CS-9 cells, the COS-7 line of monkey kidney cells (ATCC CRL 1651) (see Gluzman et al., 1981, Cell 23:175), L cells, C127 cells, 3T3 cells (ATCC CCL 163), Chinese hamster ovary (CHO) cells or their derivatives such as Veggie CHO and related cell lines which grow in serum-free media (see Rasmussen et al., 1998, Cytotechnology 28:31), HeLa cells, BHK (ATCC CRL 10) cell lines, the CV1/EBNA cell line derived from the African green monkey kidney cell line CV1 (ATCC CCL 70) (see McMahan et al., 1991, EMBO J. 10:2821), human embryonic kidney cells such as 293, 293 EBNA or MSR 293, human epidermal A431 cells, human Colo205 cells, other transformed primate cell lines, normal diploid cells, cell strains derived from in vitro culture of primary tissue, primary explants, HL-60, U937, HaK or Jurkat cells. Typically, a host cell is a cultured cell that can be transformed or transfected with a polypeptide-encoding nucleic acid, which can then be expressed in the host cell.

[0103] The phrase “recombinant host cell” can be used to denote a host cell that has been transformed or transfected with a nucleic acid to be expressed. A host cell also can be a cell that comprises the nucleic acid but does not express it at a desired level unless a regulatory sequence is introduced into the host cell such that it becomes operably linked with the nucleic acid. It is understood that the term host cell refers not only to the particular subject cell but to the progeny or potential progeny of such a cell. Because certain modifications may occur in succeeding generations due to, e.g., mutation or environmental influence, such progeny may not, in fact, be identical to the parent cell, but are still included within the scope of the term as used herein.

### 7.2. Other Interpretational Conventions

[0104] Ranges recited herein are understood to be shorthand for all of the values within the range, inclusive of the recited endpoints. For example, a range of 1 to 50 is understood to include any number, combination of numbers, or sub-range from the group consisting of 1, 2, 3, 4, 5, 6, 7, 8, 9, 10, 11, 12, 13, 14, 15, 16, 17, 18, 19, 20, 21, 22, 23, 24, 25, 26, 27, 28, 29, 30, 31, 32, 33, 34, 35, 36, 37, 38, 39, 40, 41, 42, 43, 44, 45, 46, 47, 48, 49, and 50.

[0105] Unless otherwise indicated, reference to a compound that has one or more stereocenters intends each stereoisomer, and all combinations of stereoisomers, thereof.

### 7.3. Nucleic Acids

[0106] In one aspect, the present disclosure provides isolated nucleic acid molecules. The nucleic acids comprise, for example, polynucleotides that encode all or part of an antigen binding protein, for example, one or both chains of an antibody of the present disclosure, or a fragment, derivative, mutein, or variant thereof, polynucleotides sufficient for use as hybridization probes, PCR primers or sequencing primers for identifying, analyzing, mutating or amplifying a polynucleotide encoding a polypeptide, anti-sense nucleic acids for inhibiting expression of a polynucleotide, and complementary sequences of the foregoing. The nucleic acids can be any length. They can be, for example, 5, 10, 15, 20, 25, 30, 35, 40, 45, 50, 75, 100, 125, 150, 175, 200, 250, 300, 350, 400, 450, 500, 750, 1,000, 1,500, 3,000, 5,000 or more nucleotides in length, and/or can comprise one or more additional sequences, for example, regulatory sequences, and/or be part of a larger nucleic acid, for example, a vector. The nucleic acids can be single-stranded or double-stranded and can comprise RNA and/or DNA nucleotides, and artificial variants thereof (e.g., peptide nucleic acids).

[0107] Nucleic acids encoding antibody polypeptides (e.g., heavy or light chain, variable domain only, or full length) can be isolated from B-cells of mice that have been immunized with CTLA-4. The nucleic acid can be isolated by conventional procedures such as polymerase chain reaction (PCR).

[0108] Nucleic acid sequences encoding the variable regions of the heavy and light chain variable regions are shown herein. The skilled artisan will appreciate that, due to the degeneracy of the genetic code, each of the polypeptide sequences disclosed herein is encoded by a large number of other nucleic acid sequences. The present disclosure provides each degenerate nucleotide sequence encoding each antigen binding protein of the present disclosure.

[0109] The present disclosure further provides nucleic acids that hybridize to other nucleic acids (e.g., nucleic acids comprising a nucleotide sequence of any of CTLA-4 gene) under particular hybridization conditions. Methods for hybridizing nucleic acids are well-known in the art. See, e.g., Curr. Prot. in Mol. Biol., John Wiley & Sons, N.Y. (1989), 6.3.1-6.3.6. As defined herein, a moderately stringent hybridization condition uses a prewashing solution containing 5× sodium chloride/sodium citrate (SSC), 0.5% SDS, 1.0 mM EDTA (pH 8.0), hybridization buffer of about 50% formamide, 6×SSC, and a hybridization temperature of 55° C. (or other similar hybridization solutions, such as one containing about 50% formamide, with a hybridization temperature of 42° C.), and washing conditions of 60° C., in 0.5×SSC, 0.1% SDS. A stringent hybridization condition hybridizes in 6×SSC at 450 C, followed by one or more washes in 0.1×SSC, 0.2% SDS at 68° C. Furthermore, one of skill in the art can manipulate the hybridization and/or washing conditions to increase or decrease the stringency of hybridization such that nucleic acids comprising nucleotide sequences that are at least 65, 70, 75, 80, 85, 90, 95, 98, or 99% identical to each other typically remain hybridized to each other. The basic parameters affecting the choice of hybridization conditions and guidance for devising suitable conditions are set forth by, for example, Sambrook, Fritsch, and Maniatis (1989, Molecular Cloning: A Laboratory Manual, Cold Spring Harbor Laboratory Press, Cold Spring Harbor, N.Y., chapters 9 and 11; and Curr. Prot. in Mol. Biol. 1995, Ausubel et al., eds., John Wiley & Sons, Inc., sections 2.10 and 6.3-6.4), and can be readily determined by those having ordinary skill in the art based on, for example, the length and/or base composition of the DNA.

[0110] Changes can be introduced by mutation into a nucleic acid, thereby leading to changes in the amino acid sequence of a polypeptide (e.g., an antigen binding protein) that it encodes. Mutations can be introduced using any technique known in the art. In one embodiment, one or more particular amino acid residues are changed using, for example, a site-directed mutagenesis protocol. In another embodiment, one or more randomly selected residues are changed using, for example, a random mutagenesis protocol. However it is made, a mutant polypeptide can be expressed and screened for a desired property (e.g., binding to CTLA-4).

[0111] Mutations can be introduced into a nucleic acid without significantly altering the biological activity of a polypeptide that it encodes. For example, one can make nucleotide substitutions leading to amino acid substitutions at non-essential amino acid residues. In one embodiment, a nucleotide sequence provided herein for CTLA-4, or a desired fragment, variant, or derivative thereof, is mutated such that it encodes an amino acid sequence comprising one or more deletions or substitutions of amino acid residues that are shown herein for CTLA-4 to be residues where two or more sequences differ. Alternatively, one or more mutations can be introduced into a nucleic acid that selectively change the biological activity (e.g., binding of CTLA-4) of a polypeptide that it encodes. For example, the mutation can quantitatively or qualitatively change the biological activity. Examples of quantitative changes include increasing, reducing or eliminating the activity. Examples of qualitative changes include changing the antigen specificity of an antigen binding protein.

[0112] In another aspect, the present disclosure provides nucleic acid molecules that are suitable for use as primers or hybridization probes for the detection of nucleic acid sequences of the present disclosure. A nucleic acid molecule of the present disclosure can comprise only a portion of a nucleic acid sequence encoding a full-length polypeptide of the present disclosure, for example, a fragment that can be used as a probe or primer or a fragment encoding an active portion (e.g., a CTLA-4 binding portion) of a polypeptide of the present disclosure.

[0113] Probes based on the sequence of a nucleic acid of the present disclosure can be used to detect the nucleic acid or similar nucleic acids, for example, transcripts encoding a polypeptide of the present disclosure. The probe can comprise a label group, e.g., a radioisotope, a fluorescent compound, an enzyme, or an enzyme co-factor. Such probes can be used to identify a cell that expresses the polypeptide

### 7.4. Expression Vectors

[0114] The present disclosure provides vectors comprising a nucleic acid encoding a polypeptide of the present disclosure or a portion thereof. Examples of vectors include, but are not limited to, plasmids, viral vectors, non-episomal mammalian vectors and expression vectors, for example, recombinant expression vectors.

[0115] In another aspect of the present disclosure, expression vectors containing the nucleic acid molecules and polynucleotides of the present disclosure are also provided, and host cells transformed with such vectors, and methods of producing the polypeptides are also provided. The term “expression vector” refers to a plasmid, phage, virus or vector for expressing a polypeptide from a polynucleotide sequence. Vectors for the expression of the polypeptides contain at a minimum sequences required for vector propagation and for expression of the cloned insert. An expression vector comprises a transcriptional unit comprising an assembly of (1) a genetic element or elements having a regulatory role in gene expression, for example, promoters or enhancers, (2) a sequence that encodes polypeptides and proteins to be transcribed into mRNA and translated into protein, and (3) appropriate transcription initiation and termination sequences. These sequences may further include a selection marker. Vectors suitable for expression in host cells are readily available and the nucleic acid molecules are inserted into the vectors using standard recombinant DNA techniques. Such vectors can include promoters which function in specific tissues, and viral vectors for the expression of polypeptides in targeted human or animal cells.

[0116] The recombinant expression vectors of the present disclosure can comprise a nucleic acid of the present disclosure in a form suitable for expression of the nucleic acid in a host cell. The recombinant expression vectors include one or more regulatory sequences, selected on the basis of the host cells to be used for expression, which is operably linked to the nucleic acid sequence to be expressed. Regulatory sequences include those that direct constitutive expression of a nucleotide sequence in many types of host cells (e.g., SV40 early gene enhancer, Rous sarcoma virus promoter and cytomegalovirus promoter), those that direct expression of the nucleotide sequence only in certain host cells (e.g., tissue-specific regulatory sequences, see Voss et al., 1986, Trends Biochem. Sci. 11:287, Maniatis et al., 1987, Science 236:1237, incorporated by reference herein in their entireties), and those that direct inducible expression of a nucleotide sequence in response to particular treatment or condition (e.g., the metallothionin promoter in mammalian cells and the tet-responsive and/or streptomycin responsive promoter in both prokaryotic and eukaryotic systems (see id.). It will be appreciated by those skilled in the art that the design of the expression vector can depend on such factors as the choice of the host cell to be transformed, the level of expression of protein desired, etc. The expression vectors of the present disclosure can be introduced into host cells to thereby produce proteins or peptides, including fusion proteins or peptides, encoded by nucleic acids as described herein.

[0117] In some embodiments, the expression vector is an expression vector purified from one of the clones of the library of CTLA-4 binding clones deposited under ATCC Accession No. PTA-125512. In some embodiments, the expression vector is generated by genetic modification of one of an expression vector in one of the clones purified from the library of CTLA-4 binding clones deposited under ATCC Accession No. PTA-125512. In some embodiments, the expression vector is generated by using variable region sequences of heavy and light chains of one of the clones of the library of CTLA-4 binding clones deposited under ATCC Accession No. PTA-125512.

[0118] The present disclosure further provides methods of making polypeptides. A variety of other expression/host systems may be utilized. Vector DNA can be introduced into prokaryotic or eukaryotic systems via conventional transformation or transfection techniques. These systems include but are not limited to microorganisms such as bacteria (for example, E. coli) transformed with recombinant bacteriophage, plasmid or cosmid DNA expression vectors; yeast transformed with yeast expression vectors; insect cell systems infected with virus expression vectors (e.g., baculovirus); plant cell systems transfected with virus expression vectors (e.g., cauliflower mosaic virus, CaMV; tobacco mosaic virus, TMV) or transformed with bacterial expression vectors (e.g., Ti or pBR322 plasmid); or animal cell systems. Mammalian cells useful in recombinant protein production include but are not limited to VERO cells, HeLa cells, Chinese hamster ovary (CHO) cell lines, or their derivatives such as Veggie CHO and related cell lines which grow in serum-free media (see Rasmussen et al., 1998, Cytotechnology 28:31) or CHO strain DX-B11, which is deficient in DHFR (see Urlaub et al., 1980, Proc. Natl. Acad. Sci. USA 77:4216-20) COS cells such as the COS-7 line of monkey kidney cells (ATCC CRL 1651) (see Gluzman et al., 1981, Cell 23:175), W138, BHK, HepG2, 3T3 (ATCC CCL 163), RIN, MDCK, A549, PC12, K562, L cells, C127 cells, BHK (ATCC CRL 10) cell lines, the CV1/EBNA cell line derived from the African green monkey kidney cell line CV1 (ATCC CCL 70) (see McMahan et al., 1991, EMBO J. 10:2821), human embryonic kidney cells such as 293, 293 EBNA or MSR 293, human epidermal A431 cells, human Colo205 cells, other transformed primate cell lines, normal diploid cells, cell strains derived from in vitro culture of primary tissue, primary explants, HL-60, U937, HaK or Jurkat cells. Mammalian expression allows for the production of secreted or soluble polypeptides which may be recovered from the growth medium.

[0119] For stable transfection of mammalian cells, it is known that, depending upon the expression vector and transfection technique used, only a small fraction of cells may integrate the foreign DNA into their genome. In order to identify and select these integrants, a gene that encodes a selectable marker (e.g., for resistance to antibiotics) is generally introduced into the host cells along with the gene of interest. Once such cells are transformed with vectors that contain selectable markers as well as the desired expression cassette, the cells can be allowed to grow in an enriched media before they are switched to selective media, for example. The selectable marker is designed to allow growth and recovery of cells that successfully express the introduced sequences. Resistant clumps of stably transformed cells can be proliferated using tissue culture techniques appropriate to the cell line employed. An overview of expression of recombinant proteins is found in Methods of Enzymology, v. 185, Goeddell, D. V., ed., Academic Press (1990). Preferred selectable markers include those which confer resistance to drugs, such as G418, hygromycin and methotrexate. Cells stably transfected with the introduced nucleic acid can be identified by drug selection (e.g., cells that have incorporated the selectable marker gene will survive, while the other cells die), among other methods.

[0120] The transformed cells can be cultured under conditions that promote expression of the polypeptide, and the polypeptide recovered by conventional protein purification procedures (as defined above). One such purification procedure includes the use of affinity chromatography, e.g., over a matrix having all or a portion (e.g., the extracellular domain) of CTLA-4 bound thereto. Polypeptides contemplated for use herein include substantially homogeneous recombinant mammalian anti-CTLA-4 antibody polypeptides substantially free of contaminating endogenous materials.

[0121] In some cases, such as in expression using prokaryotic systems, the expressed polypeptides of this disclosure may need to be “refolded” and oxidized into a proper tertiary structure and disulfide linkages generated in order to be biologically active. Refolding can be accomplished using a number of procedures well known in the art. Such methods include, for example, exposing the solubilized polypeptide to a pH usually above 7 in the presence of a chaotropic agent. The selection of chaotrope is similar to the choices used for inclusion body solubilization; however a chaotrope is typically used at a lower concentration. Exemplary chaotropic agents are guanidine and urea. In most cases, the refolding/oxidation solution will also contain a reducing agent plus its oxidized form in a specific ratio to generate a particular redox potential which allows for disulfide shuffling to occur for the formation of cysteine bridges. Some commonly used redox couples include cysteine/cystamine, glutathione/dithiobisGSH, cupric chloride, dithiothreitol DTT/dithiane DTT, and 2-mercaptoethanol (bME)/dithio-bME. In many instances, a co-solvent may be used to increase the efficiency of the refolding. Commonly used cosolvents include glycerol, polyethylene glycol of various molecular weights, and arginine.

[0122] In addition, the polypeptides can be synthesized in solution or on a solid support in accordance with conventional techniques. Various automatic synthesizers are commercially available and can be used in accordance with known protocols. See, for example, Stewart and Young, Solid Phase Peptide Synthesis, 2d. Ed., Pierce Chemical Co. (1984); Tam et al., J Am Chem Soc, 105:6442, (1983); Merrifield, Science 232:341-347 (1986); Barany and Merrifield, The Peptides, Gross and Meienhofer, eds, Academic Press, New York, 1-284; Barany et al., Int J Pep Protein Res, 30:705-739 (1987).

[0123] The polypeptides and proteins of the present disclosure can be purified according to protein purification techniques well known to those of skill in the art. These techniques involve, at one level, the crude fractionation of the proteinaceous and non-proteinaceous fractions. Having separated the peptide polypeptides from other proteins, the peptide or polypeptide of interest can be further purified using chromatographic and electrophoretic techniques to achieve partial or complete purification (or purification to homogeneity). The term “purified polypeptide” as used herein, is intended to refer to a composition, isolatable from other components, wherein the polypeptide is purified to any degree relative to its naturally-obtainable state. A purified polypeptide therefore also refers to a polypeptide that is free from the environment in which it may naturally occur. Generally, “purified” will refer to a polypeptide composition that has been subjected to fractionation to remove various other components, and which composition substantially retains its expressed biological activity. Where the term “substantially purified” is used, this designation will refer to a peptide or polypeptide composition in which the polypeptide or peptide forms the major component of the composition, such as constituting about 50%, about 60%, about 70% about 80%, about 85%, or about 90% or more of the proteins in the composition.

[0124] Various techniques suitable for use in purification will be well known to those of skill in the art. These include, for example, precipitation with ammonium sulphate, PEG, antibodies (immunoprecipitation) and the like or by heat denaturation, followed by centrifugation; chromatography such as affinity chromatography (Protein-A columns), ion exchange, gel filtration, reverse phase, hydroxylapatite, hydrophobic interaction chromatography, isoelectric focusing, gel electrophoresis, and combinations of these techniques. As is generally known in the art, it is believed that the order of conducting the various purification steps may be changed, or that certain steps may be omitted, and still result in a suitable method for the preparation of a substantially purified polypeptide. Exemplary purification steps are provided in the Examples below.

[0125] Various methods for quantifying the degree of purification of polypeptide will be known to those of skill in the art in light of the present disclosure. These include, for example, determining the specific binding activity of an active fraction, or assessing the amount of peptide or polypeptide within a fraction by SDS/PAGE analysis. A preferred method for assessing the purity of a polypeptide fraction is to calculate the binding activity of the fraction, to compare it to the binding activity of the initial extract, and to thus calculate the degree of purification, herein assessed by a “-fold purification number.” The actual units used to represent the amount of binding activity will, of course, be dependent upon the particular assay technique chosen to follow the purification and whether or not the polypeptide or peptide exhibits a detectable binding activity.

### 7.5. Antibody

[0126] CTLA-4 antibodies can be purified from host cells that have been transfected by a gene encoding the antibodies by elution of filtered supernatant of host cell culture fluid using a Heparin HP column, using a salt gradient.

[0127] A Fab fragment is a monovalent fragment having the V_{L}, V_{H}, C_{L} and C_{H1} domains; a F(ab′)₂ fragment is a bivalent fragment having two Fab fragments linked by a disulfide bridge at the hinge region; a Fd fragment has the V_{H} and C_{H1} domains; an Fv fragment has the V_{L} and V_{H} domains of a single arm of an antibody; and a dAb fragment has a V_{H} domain, a V_{L} domain, or an antigen-binding fragment of a V_{H} or V_{L} domain (U.S. Pat. Nos. 6,846,634, 6,696,245, US App. Pub. No. 05/0202512, 04/0202995, 04/0038291, 04/0009507, 03/0039958, Ward et al., Nature 341:544-546, 1989).

[0128] Polynucleotide and polypeptide sequences of particular light and heavy chain variable domains are described below. Antibodies comprising a light chain and heavy chain are designated by combining the name of the light chain and the name of the heavy chain variable domains. For example, “L4H7,” indicates an antibody comprising the light chain variable domain of L4 (comprising a sequence of SEQ ID NO:4) and the heavy chain variable domain of H7 (comprising a sequence of SEQ ID NO: 107). Light chain variable sequences are provided in SEQ ID Nos: 1-28, and heavy chain variable sequences are provided in SEQ ID Nos: 101-128.

[0129] In other embodiments, an antibody may comprise a specific heavy or light chain, while the complementary light or heavy chain variable domain remains unspecified. In particular, certain embodiments herein include antibodies that bind a specific antigen (such as CTLA-4) by way of a specific light or heavy chain, such that the complementary heavy or light chain may be promiscuous, or even irrelevant, but may be determined by, for example, screening combinatorial libraries. Portolano et al., J. Immunol. V. 150 (3), pp. 880-887 (1993); Clackson et al., Nature v. 352 pp. 624-628 (1991); Adler et al., A natively paired antibody library yields drug leads with higher sensitivity and specificity than a randomly paired antibody library, MAbs (2018)); Adler et al., Rare, high-affinity mouse anti-CTLA-4 antibodies that function in checkpoint blockade, discovered using microfluidics and molecular genomics, MAbs (2017).

[0130] Naturally occurring immunoglobulin chains exhibit the same general structure of relatively conserved framework regions (FR) joined by three hypervariable regions, also called complementarity determining regions or CDRs. From N-terminus to C-terminus, both light and heavy chains comprise the domains FR1, CDR1, FR2, CDR2, FR3, CDR3 and FR4. The assignment of amino acids to each domain is in accordance with the definitions of Kabat et al. in Sequences of Proteins of Immunological Interest, 5th Ed., US Dept. of Health and Human Services, PHS, NIH, NIH Publication no. 91-3242, 1991.

[0131] The term “human antibody,” also referred to as “fully human antibody,” includes all antibodies that have one or more variable and constant regions derived from human immunoglobulin sequences. In one embodiment, all of the variable and constant domains are derived from human immunoglobulin sequences (a fully human antibody). These antibodies may be prepared in a variety of ways, examples of which are described below, including through the immunization with an antigen of interest of a mouse that is genetically modified to express antibodies derived from human heavy and/or light chain-encoding genes.

[0132] A humanized antibody has a sequence that differs from the sequence of an antibody derived from a non-human species by one or more amino acid substitutions, deletions, and/or additions, such that the humanized antibody is less likely to induce an immune response, and/or induces a less severe immune response, as compared to the non-human species antibody, when it is administered to a human subject. In one embodiment, certain amino acids in the framework and constant domains of the heavy and/or light chains of the non-human species antibody are mutated to produce the humanized antibody. In another embodiment, the constant domain(s) from a human antibody are fused to the variable domain(s) of a non-human species. In another embodiment, one or more amino acid residues in one or more CDR sequences of a non-human antibody are changed to reduce the likely immunogenicity of the non-human antibody when it is administered to a human subject, wherein the changed amino acid residues either are not critical for immunospecific binding of the antibody to its antigen, or the changes to the amino acid sequence that are made are conservative changes, such that the binding of the humanized antibody to the antigen is not significantly worse than the binding of the non-human antibody to the antigen. Examples of how to make humanized antibodies may be found in U.S. Pat. Nos. 6,054,297, 5,886,152 and 5,877,293.

[0133] The term “chimeric antibody” refers to an antibody that contains one or more regions from one antibody and one or more regions from one or more other antibodies. In one embodiment, one or more of the CDRs are derived from a human anti-CTLA-4 antibody. In another embodiment, all of the CDRs are derived from a human anti-CTLA-4 antibody. In another embodiment, the CDRs from more than one human anti-CTLA-4 antibodies are mixed and matched in a chimeric antibody. For instance, a chimeric antibody may comprise a CDR1 from the light chain of a first human anti-CTLA-4 antibody, a CDR2 and a CDR3 from the light chain of a second human anti-CTLA-4 antibody, and the CDRs from the heavy chain from a third anti-CTLA-4 antibody. Further, the framework regions may be derived from one of the same anti-CTLA-4 antibodies, from one or more different antibodies, such as a human antibody, or from a humanized antibody. In one example of a chimeric antibody, a portion of the heavy and/or light chain is identical with, homologous to, or derived from an antibody from a particular species or belonging to a particular antibody class or subclass, while the remainder of the chain(s) is/are identical with, homologous to, or derived from an antibody(-ies) from another species or belonging to another antibody class or subclass. Also included are fragments of such antibodies that exhibit the desired biological activity (i.e., the ability to specifically bind CTLA-4).

[0134] Fragments or analogs of antibodies can be readily prepared by those of ordinary skill in the art following the teachings of this specification and using techniques well-known in the art. Preferred amino- and carboxy-termini of fragments or analogs occur near boundaries of functional domains. Structural and functional domains can be identified by comparison of the nucleotide and/or amino acid sequence data to public or proprietary sequence databases. Computerized comparison methods can be used to identify sequence motifs or predicted protein conformation domains that occur in other proteins of known structure and/or function. Methods to identify protein sequences that fold into a known three-dimensional structure are known. See, e.g., Bowie et al., 1991, Science 253:164.

[0135] Antigen binding fragments derived from an antibody can be obtained, for example, by proteolytic hydrolysis of the antibody, for example, pepsin or papain digestion of whole antibodies according to conventional methods. By way of example, antibody fragments can be produced by enzymatic cleavage of antibodies with pepsin to provide a 5S fragment termed F(ab′)2. This fragment can be further cleaved using a thiol reducing agent to produce 3.5S Fab′ monovalent fragments. Optionally, the cleavage reaction can be performed using a blocking group for the sulfhydryl groups that result from cleavage of disulfide linkages. As an alternative, an enzymatic cleavage using papain produces two monovalent Fab fragments and an Fc fragment directly. These methods are described, for example, by Goldenberg, U.S. Pat. No. 4,331,647, Nisonoff et al., Arch. Biochem. Biophys. 89:230, 1960; Porter, Biochem. J. 73:119, 1959; Edelman et al., in Methods in Enzymology 1:422 (Academic Press 1967); and by Andrews, S. M. and Titus, J. A. in Current Protocols in Immunology (Coligan J. E., et al., eds), John Wiley & Sons, New York (2003), pages 2.8.1 2.8.10 and 2.10A.1 2.10A.5. Other methods for cleaving antibodies, such as separating heavy chains to form monovalent light heavy chain fragments (Fd), further cleaving of fragments, or other enzymatic, chemical, or genetic techniques may also be used, so long as the fragments bind to the antigen that is recognized by the intact antibody.

[0136] An antibody fragment may also be any synthetic or genetically engineered protein. For example, antibody fragments include isolated fragments consisting of the light chain variable region, “Fv” fragments consisting of the variable regions of the heavy and light chains, recombinant single chain polypeptide molecules in which light and heavy variable regions are connected by a peptide linker (scFv proteins).

[0137] Another form of an antibody fragment is a peptide comprising one or more complementarity determining regions (CDRs) of an antibody. CDRs (also termed “minimal recognition units”, or “hypervariable region”) can be incorporated into a molecule either covalently or noncovalently to make it an antigen binding protein. CDRs can be obtained by constructing polynucleotides that encode the CDR of interest. Such polynucleotides are prepared, for example, by using the polymerase chain reaction to synthesize the variable region using mRNA of antibody producing cells as a template (see, for example, Larrick et al., Methods: A Companion to Methods in Enzymology 2:106, 1991; Courtenay Luck, “Genetic Manipulation of Monoclonal Antibodies,” in Monoclonal Antibodies: Production, Engineering and Clinical Application, Ritter et al. (eds.), page 166 (Cambridge University Press 1995); and Ward et al., “Genetic Manipulation and Expression of Antibodies,” in Monoclonal Antibodies: Principles and Applications, Birch et al., (eds.), page 137 (Wiley Liss, Inc. 1995).

[0138] Thus, in one embodiment, the binding agent comprises at least one CDR as described herein. The binding agent may comprise at least two, three, four, five or six CDR's as described herein. The binding agent may further comprise at least one variable region domain of an antibody described herein. The variable region domain may be of any size or amino acid composition and will generally comprise at least one CDR sequence responsible for binding to human CTLA-4, for example CDR1-H, CDR2-H, CDR3-H, CDR1-L, CDR2-L, and CDR3-L, specifically described herein and which is adjacent to or in frame with one or more framework sequences. In general terms, the variable (V) region domain may be any suitable arrangement of immunoglobulin heavy (V_{H}) and/or light (V_{L}) chain variable domains. Thus, for example, the V region domain may be monomeric and be a V_{H} or V_{L} domain, which is capable of independently binding human CTLA-4 with an affinity at least equal to 1×10⁷M or less as described below. Alternatively, the V region domain may be dimeric and contain V_{H} V_{H}, V_{H} V_{L}, or V_{L} V_{L}, dimers. The V region dimer comprises at least one V_{H} and at least one V_{L} chain that may be non-covalently associated (hereinafter referred to as Fv). If desired, the chains may be covalently coupled either directly, for example via a disulfide bond between the two variable domains, or through a linker, for example a peptide linker, to form a single chain Fv (scFV).

[0139] The variable region domain may be any naturally occurring variable domain or an engineered version thereof. By engineered version is meant a variable region domain that has been created using recombinant DNA engineering techniques. Such engineered versions include those created, for example, from a specific antibody variable region by insertions, deletions, or changes in or to the amino acid sequences of the specific antibody. Particular examples include engineered variable region domains containing at least one CDR and optionally one or more framework amino acids from a first antibody and the remainder of the variable region domain from a second antibody.

[0140] The variable region domain may be covalently attached at a C terminal amino acid to at least one other antibody domain or a fragment thereof. Thus, for example, a V_{H} domain that is present in the variable region domain may be linked to an immunoglobulin CHI domain, or a fragment thereof. Similarly a V_{L} domain may be linked to a CK domain or a fragment thereof. In this way, for example, the antibody may be a Fab fragment wherein the antigen binding domain contains associated V_{H} and V_{L} domains covalently linked at their C termini to a CHI and CK domain, respectively. The CHI domain may be extended with further amino acids, for example to provide a hinge region or a portion of a hinge region domain as found in a Fab′ fragment, or to provide further domains, such as antibody C_{H2} and C_{H3} domains.

[0141] As described herein, antibodies comprise at least one of these CDRs. For example, one or more CDR may be incorporated into known antibody framework regions (IgG1, IgG2, etc.), or conjugated to a suitable vehicle to enhance the half-life thereof. Suitable vehicles include, but are not limited to Fc, polyethylene glycol (PEG), albumin, transferrin, and the like. These and other suitable vehicles are known in the art. Such conjugated CDR peptides may be in monomeric, dimeric, tetrameric, or other form. In one embodiment, one or more water-soluble polymer is bonded at one or more specific position, for example at the amino terminus, of a binding agent.

[0142] In another example, individual V_{L} or V_{H} chains from an antibody (i.e. CTLA-4 antibody) can be used to search for other V_{H} or V_{L} chains that could form antigen-binding fragments (or Fab), with the same specificity. Thus, random combinations of V_{H} and V_{L} chain Ig genes can be expressed as antigen-binding fragments in a bacteriophage library (such as fd or lambda phage). For instance, a combinatorial library may be generated by utilizing the parent V_{L} or V_{H} chain library combined with antigen-binding specific V_{L} or V_{H} chain libraries, respectively. The combinatorial libraries may then be screened by conventional techniques, for example by using radioactively labeled probe (such as radioactively labeled CTLA-4). See, for example, Portolano et al., J. Immunol. V. 150 (3) pp. 880-887 (1993).

[0143] Diabodies are bivalent antibodies comprising two polypeptide chains, wherein each polypeptide chain comprises V_{H} and V_{L} domains joined by a linker that is too short to allow for pairing between two domains on the same chain, thus allowing each domain to pair with a complementary domain on another polypeptide chain (see, e.g., Holliger et al., 1993, Proc. Natl. Acad. Sci. USA 90:6444-48, and Poljak et al., 1994, Structure 2:1121-23). If the two polypeptide chains of a diabody are identical, then a diabody resulting from their pairing will have two identical antigen binding sites. Polypeptide chains having different sequences can be used to make a diabody with two different antigen binding sites. Similarly, tribodies and tetrabodies are antibodies comprising three and four polypeptide chains, respectively, and forming three and four antigen binding sites, respectively, which can be the same or different.

[0144] Antibody polypeptides are also disclosed in U.S. Pat. No. 6,703,199, including fibronectin polypeptide monobodies. Other antibody polypeptides are disclosed in U.S. Patent Publication 2005/0238646, which are single-chain polypeptides.

[0145] In certain embodiments, an antibody comprises one or more water soluble polymer attachments, including, but not limited to, polyethylene glycol, polyoxyethylene glycol, or polypropylene glycol. See, e.g., U.S. Pat. Nos. 4,640,835, 4,496,689, 4,301,144, 4,670,417, 4,791,192 and 4,179,337. In certain embodiments, a derivative binding agent comprises one or more of monomethoxy-polyethylene glycol, dextran, cellulose, or other carbohydrate based polymers, poly-(N-vinyl pyrrolidone)-polyethylene glycol, propylene glycol homopolymers, a polypropylene oxide/ethylene oxide co-polymer, polyoxyethylated polyols (e.g., glycerol) and polyvinyl alcohol, as well as mixtures of such polymers. In certain embodiments, one or more water-soluble polymer is randomly attached to one or more side chains. In certain embodiments, PEG can act to improve the therapeutic capacity for a binding agent, such as an antibody. Certain such methods are discussed, for example, in U.S. Pat. No. 6,133,426, which is hereby incorporated by reference for any purpose.

### 7.6. Antigen Binding Protein

[0146] In one aspect, the present disclosure provides antigen binding proteins (e.g., antibodies, antibody fragments, antibody derivatives, antibody muteins, and antibody variants), that bind to CTLA-4.

[0147] An antigen binding protein can have, for example, the structure of a naturally occurring immunoglobulin. An “immunoglobulin” is a tetrameric molecule. In a naturally occurring immunoglobulin, each tetramer is composed of two identical pairs of polypeptide chains, each pair having one “light” (about 25 kDa) and one “heavy” chain (about 50-70 kDa). The amino-terminal portion of each chain includes a variable region of about 100 to 110 or more amino acids primarily responsible for antigen recognition. The carboxy-terminal portion of each chain defines a constant region primarily responsible for effector function. Human light chains are classified as kappa and lambda light chains. Heavy chains are classified as mu, delta, gamma, alpha, or epsilon, and define the antibody's isotype as IgM, IgD, IgG, IgA, and IgE, respectively. Within light and heavy chains, the variable and constant regions are joined by a “J” region of about 12 or more amino acids, with the heavy chain also including a “D” region of about 10 more amino acids. See generally, Fundamental Immunology Ch. 7 (Paul, W., ed., 2nd ed. Raven Press, N.Y. (1989)) (incorporated by reference in its entirety for all purposes). The variable regions of each light/heavy chain pair form the antibody binding site such that an intact immunoglobulin has two binding sites.

[0148] Antigen binding proteins in accordance with the present disclosure include antigen binding proteins that inhibit a biological activity of CTLA-4.

[0149] Different antigen binding proteins may bind to different domains of CTLA-4 or act by different mechanisms of action. As indicated herein inter alia, the domain region are designated such as to be inclusive of the group, unless otherwise indicated. For example, amino acids 4-12 refers to nine amino acids: amino acids at positions 4, and 12, as well as the seven intervening amino acids in the sequence. Other examples include antigen binding proteins that inhibit binding of CTLA-4 to its ligands. An antigen binding protein need not completely inhibit a CTLA-4-induced activity to find use in the present disclosure; rather, antigen binding proteins that reduce a particular activity of CTLA-4 are contemplated for use as well. (Discussions herein of particular mechanisms of action for CTLA-4-binding antigen binding proteins in treating particular diseases are illustrative only, and the methods presented herein are not bound thereby.)

[0150] In another aspect, the present disclosure provides antigen binding proteins that comprise a light chain variable region selected from the group consisting of A1LC-A28LC or a heavy chain variable region selected from the group consisting of A1HC-A28HC, and fragments, derivatives, muteins, and variants thereof. Such an antigen binding protein can be denoted using the nomenclature “LxHy,” wherein “x” corresponds to the number of the light chain variable region and “y” corresponds to the number of the heavy chain variable region as they are labeled in the sequences below. That is to say, for example, that “A1HC” denotes the heavy chain variable region comprising the amino acid sequence of SEQ ID NO: 101; “A1LC” denotes the light chain variable region comprising the amino acid sequence of SEQ ID NO:1, and so forth. More generally speaking, “L2H1” refers to an antigen binding protein with a light chain variable region comprising the amino acid sequence of L2 (SEQ ID NO:2) and a heavy chain variable region comprising the amino acid sequence of H1 (SEQ ID NO: 101). For clarity, all ranges denoted by at least two members of a group include all members of the group between and including the end range members. Thus, the group range A1-A28, includes all members between A1 and A28, as well as members A1 and A28 themselves. The group range A4-A6 includes members A4, A5, and A6, etc.

[0151] In some embodiments, antigen binding proteins comprise variable (V(D)J) regions of both heavy and light chain sequences identical to one of the clones in the library of CTLA-4 binding clones, deposited under ATCC Accession NO. PTA-125512. In some embodiments, antigen binding proteins comprise variable (V(D)J) regions of either heavy or light chain sequence identical to one of the clones in the library of CTLA-4 binding clones, deposited under ATCC Accession NO. PTA-125512. In some embodiments, antigen binding proteins are expressed from the expression vector in one of the clones in the library of CTLA-4 binding clones, deposited under ATCC Accession NO. PTA-125512.

[0152] Also shown below are the locations of the CDRs (underlined) that create part of the antigen-binding site, while the Framework Regions (FRs) are the intervening segments of these variable domain sequences. In both light chain variable regions and heavy chain variable regions there are three CDRs (CDR1-3) and four FRs (FR 1-4). The CDR regions of each light and heavy chain also are grouped by antibody type (A1, A2, A3, etc.). Antigen binding proteins of the present disclosure include, for example, antigen binding proteins having a combination of light chain and heavy chain variable domains selected from the group of combinations consisting of L1H1 (antibody A1), L2H2 (antibody A2), L3H3 (antibody A3), L4H4 (antibody A4), L5H5 (antibody A5), L6H6 (antibody A6), L7H7 (antibody A7), L8H8 (antibody A8), L9H9 (antibody A9), L10H10 (antibody A10), L11H11 (antibody A11), L12H12 (antibody A12), L13H13 (antibody A13), . . . and L28H28 (antibody A28).

[0153] In some embodiments, antigen binding proteins comprise all six CDR sequences (three CDRs of light chain and three CDRs of heavy chain) identical to one of the clones in the library of CTLA-4 binding clones, deposited under ATCC Accession NO. PTA-125512. In some embodiments, antigen binding proteins comprise three out of six CDR sequences (three CDRs of light chain or three CDRs of heavy chain) identical to one of the clones in the library of CTLA-4 binding clones, deposited under ATCC Accession NO. PTA-125512. In some embodiments, antigen binding proteins comprise one, two, three, four, or five out of six CDR sequences identical to one of the clones in the library of CTLA-4 binding clones, deposited under ATCC Accession NO. PTA-125512.

[0154] In one embodiment, the present disclosure provides an antigen binding protein comprising a light chain variable domain comprising a sequence of amino acids that differs from the sequence of a light chain variable domain selected from the group consisting of L1 through L28 only at 15, 14, 13, 12, 11, 10, 9, 8, 7, 6, 5, 4, 3, 2, or 1 residues, wherein each such sequence difference is independently either a deletion, insertion, or substitution of one amino acid residue. In another embodiment, the light-chain variable domain comprises a sequence of amino acids that is at least 70%, 75%, 80%, 85%, 90%, 95%, 96%, 97%, 98%, or 99% identical to the sequence of a light chain variable domain selected from the group consisting of L1-L28. In another embodiment, the light chain variable domain comprises a sequence of amino acids that is encoded by a nucleotide sequence that is at least 70%, 75%, 80%, 85%, 90%, 95%, 96%, 97%, 98%, or 99% identical to a nucleotide sequence that encodes a light chain variable domain selected from the group consisting of L1-L28 (which includes L1, L2, L3, L4, L5, L6, L7, L8, L9, L10, L11, L12, L13, . . . and L28). In another embodiment, the light chain variable domain comprises a sequence of amino acids that is encoded by a polynucleotide that hybridizes under moderately stringent conditions to the complement of a polynucleotide that encodes a light chain variable domain selected from the group consisting of L1-L28. In another embodiment, the light chain variable domain comprises a sequence of amino acids that is encoded by a polynucleotide that hybridizes under moderately stringent conditions to the complement of a polynucleotide that encodes a light chain variable domain selected from the group consisting of L1-L28. In another embodiment, the light chain variable domain comprises a sequence of amino acids that is encoded by a polynucleotide that hybridizes under moderately stringent conditions to a complement of a light chain polynucleotide of L1-L28.

[0155] In one embodiment, the present disclosure provides an antigen binding protein comprising a light chain variable domain comprising a sequence of amino acids that differs from the sequence of a light chain variable domain encoded by one of the clones of the library of CTLA-4 binding clones, deposited under ATCC Accession NO. PTA-125512, only at 15, 14, 13, 12, 11, 10, 9, 8, 7, 6, 5, 4, 3, 2, or 1 residues, wherein each such sequence difference is independently either a deletion, insertion, or substitution of one amino acid residue. In another embodiment, the light-chain variable domain comprises a sequence of amino acids that is at least 70%, 75%, 80%, 85%, 90%, 95%, 96%, 97%, 98%, or 99% identical to the sequence of a light chain variable domain encoded by one of the clones of the library of CTLA-4 binding clones, deposited under ATCC Accession NO. PTA-125512. In another embodiment, the light chain variable domain comprises a sequence of amino acids that is encoded by a nucleotide sequence that is at least 70%, 75%, 80%, 85%, 90%, 95%, 96%, 97%, 98%, or 99% identical to a nucleotide sequence of one of the clones of the library of CTLA-4 binding clones, deposited under ATCC Accession NO. PTA-125512.

[0156] In another embodiment, the present disclosure provides an antigen binding protein comprising a heavy chain variable domain comprising a sequence of amino acids that differs from the sequence of a heavy chain variable domain selected from the group consisting of H1-H28 only at 15, 14, 13, 12, 11, 10, 9, 8, 7, 6, 5, 4, 3, 2, or 1 residue(s), wherein each such sequence difference is independently either a deletion, insertion, or substitution of one amino acid residue. In another embodiment, the heavy chain variable domain comprises a sequence of amino acids that is at least 70%, 75%, 80%, 85%, 90%, 95%, 96%, 97%, 98%, or 99% identical to the sequence of a heavy chain variable domain selected from the group consisting of H1-H28. In another embodiment, the heavy chain variable domain comprises a sequence of amino acids that is encoded by a nucleotide sequence that is at least 70%, 75%, 80%, 85%, 90%, 95%, 96%, 97%, 98%, or 99% identical to a nucleotide sequence that encodes a heavy chain variable domain selected from the group consisting of H1-H28. In another embodiment, the heavy chain variable domain comprises a sequence of amino acids that is encoded by a polynucleotide that hybridizes under moderately stringent conditions to the complement of a polynucleotide that encodes a heavy chain variable domain selected from the group consisting of H1-H28. In another embodiment, the heavy chain variable domain comprises a sequence of amino acids that is encoded by a polynucleotide that hybridizes under moderately stringent conditions to the complement of a polynucleotide that encodes a heavy chain variable domain selected from the group consisting of H1-H28. In another embodiment, the heavy chain variable domain comprises a sequence of amino acids that is encoded by a polynucleotide that hybridizes under moderately stringent conditions to a complement of a heavy chain polynucleotide disclosed herein.

[0157] In one embodiment, the present disclosure provides an antigen binding protein comprising a heavy chain variable domain comprising a sequence of amino acids that differs from the sequence of a heavy chain variable domain encoded by one of the clones of the library of CTLA-4 binding clones, deposited under ATCC Accession NO. PTA-125512, only at 15, 14, 13, 12, 11, 10, 9, 8, 7, 6, 5, 4, 3, 2, or 1 residues, wherein each such sequence difference is independently either a deletion, insertion, or substitution of one amino acid residue. In another embodiment, the heavy chain variable domain comprises a sequence of amino acids that is at least 70%, 75%, 80%, 85%, 90%, 95%, 96%, 97%, 98%, or 99% identical to the sequence of a heavy chain variable domain encoded by one of the clones of the library of CTLA-4 binding clones, deposited under ATCC Accession NO. PTA-125512. In another embodiment, the heavy chain variable domain comprises a sequence of amino acids that is encoded by a nucleotide sequence that is at least 70%, 75%, 80%, 85%, 90%, 95%, 96%, 97%, 98%, or 99% identical to a nucleotide sequence of one of the clones of the library of CTLA-4 binding clones, deposited under ATCC Accession NO. PTA-125512.

[0158] Particular embodiments of antigen binding proteins of the present disclosure comprise one or more amino acid sequences that are identical to the amino acid sequences of one or more of the CDRs and/or FRs referenced herein. In one embodiment, the antigen binding protein comprises a light chain CDR1 sequence illustrated above. In another embodiment, the antigen binding protein comprises a light chain CDR2 sequence illustrated above. In another embodiment, the antigen binding protein comprises a light chain CDR3 sequence illustrated above. In another embodiment, the antigen binding protein comprises a heavy chain CDR1 sequence illustrated above. In another embodiment, the antigen binding protein comprises a heavy chain CDR2 sequence illustrated above. In another embodiment, the antigen binding protein comprises a heavy chain CDR3 sequence illustrated above.

[0159] In one embodiment, the present disclosure provides an antigen binding protein that comprises one or more CDR sequences that differ from a CDR sequence shown above by no more than 5, 4, 3, 2, or 1 amino acid residues.

[0160] In some embodiments, at least one of the antigen binding protein's CDR1 sequences is a CDR1 sequence from A1-A28, CDR1-L1 to 28, or CDR1-H1 to 28 as shown in TABLE 5. In some embodiments, at least one of the antigen binding protein's CDR2 sequences is a CDR2 sequence from A1-A28, CDR2-L1 to 28, or CDR2-H1 to 28 as shown in TABLE 5. In some embodiments, at least one of the antigen binding protein's CDR3 sequences is a CDR3 sequence from A1-A28, CDR3-L1 to 28, or CDR3-H1 to 28 as shown in TABLE 5.

[0161] In another embodiment, the antigen binding protein's light chain CDR3 sequence is a light chain CDR3 sequence from A1-A28 or CDR3-L1 to 28, as shown in TABLE 5, and the antigen binding protein's heavy chain CDR3 sequence is a heavy chain sequence from A1-A28 or CDR-H1 to 28, as shown in TABLE 5.

[0162] In another embodiment, the antigen binding protein comprises 1, 2, 3, 4, or 5 CDR sequence(s) that each independently differs by 6, 5, 4, 3, 2, 1, or 0 single amino acid additions, substitutions, and/or deletions from a CDR sequence of A1-A23, and the antigen binding protein further comprises 1, 2, 3, 4, or 5 CDR sequence(s) that each independently differs by 6, 5, 4, 3, 2, 1, or 0 single amino acid additions, substitutions, and/or deletions from a CDR sequence. In some embodiments, the antigen binding protein comprises 1, 2, 3, 4, or 5 CDR sequence(s) that each has at least 50%, 55%, 60%, 65%, 70%, 75%, 80%, 85%, 90%, 95%, 96%, 97%, 98%, or 99% sequence identity to a CDR sequence of A1-A28.

[0163] The nucleotide sequences of A1-A28, or the amino acid sequences of A1-A28, can be altered, for example, by random mutagenesis or by site-directed mutagenesis (e.g., oligonucleotide-directed site-specific mutagenesis) to create an altered polynucleotide comprising one or more particular nucleotide substitutions, deletions, or insertions as compared to the non-mutated polynucleotide. Examples of techniques for making such alterations are described in Walder et al., 1986, Gene 42:133; Bauer et al. 1985, Gene 37:73; Craik, BioTechniques, January 1985, 12-19; Smith et al., 1981, Genetic Engineering: Principles and Methods, Plenum Press; and U.S. Pat. Nos. 4,518,584 and 4,737,462. These and other methods can be used to make, for example, derivatives of anti-CTLA-4 antibodies that have a desired property, for example, increased affinity, avidity, or specificity for CTLA-4, increased activity or stability in vivo or in vitro, or reduced in vivo side-effects as compared to the underivatized antibody.

[0164] Other derivatives of anti-CTLA-4 antibodies within the scope of this disclosure include covalent or aggregative conjugates of anti-CTLA-4 antibodies, or fragments thereof, with other proteins or polypeptides, such as by expression of recombinant fusion proteins comprising heterologous polypeptides fused to the N-terminus or C-terminus of an anti-CTLA-4 antibody polypeptide. For example, the conjugated peptide may be a heterologous signal (or leader) polypeptide, e.g., the yeast alpha-factor leader, or a peptide such as an epitope tag. Antigen binding protein-containing fusion proteins can comprise peptides added to facilitate purification or identification of antigen binding protein (e.g., poly-His). An antigen binding protein also can be linked to the FLAG peptide Asp-Tyr-Lys-Asp-Asp-Asp-Asp-Lys (DYKDDDDK) (SEQ ID NO: 7002) as described in Hopp et al., Bio/Technology 6:1204, 1988, and U.S. Pat. No. 5,011,912. The FLAG peptide is highly antigenic and provides an epitope reversibly bound by a specific monoclonal antibody (mAb), enabling rapid assay and facile purification of expressed recombinant protein. Reagents useful for preparing fusion proteins in which the FLAG peptide is fused to a given polypeptide are commercially available (Sigma, St. Louis, MO).

[0165] One suitable Fc polypeptide, described in PCT application WO 93/10151 (hereby incorporated by reference), is a single chain polypeptide extending from the N-terminal hinge region to the native C-terminus of the Fc region of a human IgG1 antibody. Another useful Fc polypeptide is the Fc mutein described in U.S. Pat. No. 5,457,035 and in Baum et al., 1994, EMBO J. 13:3992-4001. The amino acid sequence of this mutein is identical to that of the native Fc sequence presented in WO 93/10151, except that amino acid 19 has been changed from Leu to Ala, amino acid 20 has been changed from Leu to Glu, and amino acid 22 has been changed from Gly to Ala. The mutein exhibits reduced affinity for Fc receptors.

[0166] In other embodiments, the variable portion of the heavy and/or light chains of an anti-CTLA-4 antibody may be substituted for the variable portion of an antibody heavy and/or light chain.

[0167] Oligomers that contain one or more antigen binding proteins may be employed as CTLA-4 antagonists or agonists. Oligomers may be in the form of covalently-linked or non-covalently-linked dimers, trimers, or higher oligomers. Oligomers comprising two or more antigen binding protein are contemplated for use, with one example being a homodimer. Other oligomers include heterodimers, homotrimers, heterotrimers, homotetramers, heterotetramers, etc.

[0168] One embodiment is directed to oligomers comprising multiple antigen binding proteins joined via covalent or non-covalent interactions between peptide moieties fused to the antigen binding proteins. Such peptides may be peptide linkers (spacers), or peptides that have the property of promoting oligomerization. Leucine zippers and certain polypeptides derived from antibodies are among the peptides that can promote oligomerization of antigen binding proteins attached thereto, as described in more detail below.

[0169] In particular embodiments, the oligomers comprise from two to four antigen binding proteins. The antigen binding proteins of the oligomer may be in any form, such as any of the forms described above, e.g., variants or fragments. Preferably, the oligomers comprise antigen binding proteins that have CTLA-4 binding activity.

[0170] In one embodiment, an oligomer is prepared using polypeptides derived from immunoglobulins. Preparation of fusion proteins comprising certain heterologous polypeptides fused to various portions of antibody-derived polypeptides (including the Fc domain) has been described, e.g., by Ashkenazi et al., 1991, PNAS USA 88:10535; Byrn et al., 1990, Nature 344:677; and Hollenbaugh et al., 1992 Curr. Prots in Immunol., Suppl. 4, pages 10.19.1-10.19.11.

[0171] One embodiment of the present disclosure is directed to a dimer comprising two fusion proteins created by fusing a CTLA-4 binding fragment of an anti-CTLA-4 antibody to the Fc region of an antibody. The dimer can be made by, for example, inserting a gene fusion encoding the fusion protein into an appropriate expression vector, expressing the gene fusion in host cells transformed with the recombinant expression vector, and allowing the expressed fusion protein to assemble much like antibody molecules, whereupon interchain disulfide bonds form between the Fc moieties to yield the dimer.

[0172] Alternatively, the oligomer is a fusion protein comprising multiple antigen binding proteins, with or without peptide linkers (spacer peptides). Among the suitable peptide linkers are those described in U.S. Pat. Nos. 4,751,180 and 4,935,233.

[0173] Another method for preparing oligomeric antigen binding proteins involves use of a leucine zipper. Leucine zipper domains are peptides that promote oligomerization of the proteins in which they are found. Leucine zippers were originally identified in several DNA-binding proteins (Landschulz et al., 1988, Science 240:1759), and have since been found in a variety of different proteins. Among the known leucine zippers are naturally occurring peptides and derivatives thereof that dimerize or trimerize. Examples of leucine zipper domains suitable for producing soluble oligomeric proteins are described in PCT application WO 94/10308, and the leucine zipper derived from lung surfactant protein D (SPD) described in Hoppe et al., 1994, FEBS Letters 344:191, hereby incorporated by reference. The use of a modified leucine zipper that allows for stable trimerization of a heterologous protein fused thereto is described in Fanslow et al., 1994, Semin. Immunol. 6:267-78. In one approach, recombinant fusion proteins comprising an anti-CTLA-4 antibody fragment or derivative fused to a leucine zipper peptide are expressed in suitable host cells, and the soluble oligomeric anti-CTLA-4 antibody fragments or derivatives that form are recovered from the culture supernatant.

[0174] In one aspect, the present disclosure provides antigen binding proteins that interfere with the binding of CTLA-4 to its ligands. Such antigen binding proteins can be made against CTLA-4, or a fragment, variant or derivative thereof, and screened in conventional assays for the ability to interfere with binding of CTLA-4 to its ligands. Examples of suitable assays are assays that test the antigen binding proteins for the ability to inhibit binding of CTLA-4 ligands to cells expressing CTLA-4, or that test antigen binding proteins for the ability to reduce a biological or cellular response that results from the binding of CTLA-4 ligands to cell surface CTLA-4. For example, antibodies can be screened according to their ability to bind to immobilized antibody surfaces (CTLA-4). Antigen binding proteins that block the binding of CTLA-4 to a ligand can be employed in treating any CTLA-4-related condition, including but not limited to cancer. In an embodiment, a human anti-CTLA-4 monoclonal antibody generated by procedures involving immunization of transgenic mice is employed in treating such conditions.

[0175] Antigen-binding fragments of antigen binding proteins of the present disclosure can be produced by conventional techniques. Examples of such fragments include, but are not limited to, Fab and F(ab′)₂ fragments. Antibody fragments and derivatives produced by genetic engineering techniques also are contemplated.

[0176] Additional embodiments include chimeric antibodies, e.g., humanized versions of non-human (e.g., murine) monoclonal antibodies. Such humanized antibodies may be prepared by known techniques, and offer the advantage of reduced immunogenicity when the antibodies are administered to humans. In one embodiment, a humanized monoclonal antibody comprises the variable domain of a murine antibody (or all or part of the antigen binding site thereof) and a constant domain derived from a human antibody. Alternatively, a humanized antibody fragment may comprise the antigen binding site of a murine monoclonal antibody and a variable domain fragment (lacking the antigen-binding site) derived from a human antibody. Procedures for the production of chimeric and further engineered monoclonal antibodies include those described in Riechmann et al., 1988, Nature 332:323, Liu et al., 1987, Proc. Nat. Acad. Sci. USA 84:3439, Larrick et al., 1989, Bio/Technology 7:934, and Winter et al., 1993, TIPS 14:139. In one embodiment, the chimeric antibody is a CDR grafted antibody. Techniques for humanizing antibodies are discussed in, e.g., U.S. Pat. Nos. 5,869,619, 5,225,539, 5,821,337, 5,859,205, 6,881,557, Padlan et al., 1995, FASEB J. 9:133-39, and Tamura et al., 2000, J. Immunol. 164:1432-41.

[0177] Procedures have been developed for generating human or partially human antibodies in non-human animals. For example, mice in which one or more endogenous immunoglobulin genes have been inactivated by various means have been prepared. Human immunoglobulin genes have been introduced into the mice to replace the inactivated mouse genes. Antibodies produced in the animal incorporate human immunoglobulin polypeptide chains encoded by the human genetic material introduced into the animal. In one embodiment, a non-human animal, such as a transgenic mouse, is immunized with a CTLA-4 polypeptide, such that antibodies directed against the CTLA-4 polypeptide are generated in the animal.

[0178] One example of a suitable immunogen is a soluble human CTLA-4, such as a polypeptide comprising the extracellular domain of the protein having the following sequence: SEQ ID: 7001 or other immunogenic fragment of the protein. Examples of techniques for production and use of transgenic animals for the production of human or partially human antibodies are described in U.S. Pat. Nos. 5,814,318, 5,569,825, and 5,545,806, Davis et al., 2003, Production of human antibodies from transgenic mice in Lo, ed. Antibody Engineering: Methods and Protocols, Humana Press, NJ:191-200, Kellermann et al., 2002, Curr Opin Biotechnol. 13:593-97, Russel et al., 2000, Infect Immun. 68:1820-26, Gallo et al., 2000, Eur J Immun. 30:534-40, Davis et al., 1999, Cancer Metastasis Rev. 18:421-25, Green, 1999, J Immunol Methods. 231:11-23, Jakobovits, 1998, Advanced Drug Delivery Reviews 31:33-42, Green et al., 1998, J Exp Med. 188:483-95, Jakobovits A, 1998, Exp. Opin. Invest. Drugs. 7:607-14, Tsuda et al., 1997, Genomics. 42:413-21, Mendez et al., 1997, Nat Genet. 15:146-56, Jakobovits, 1994, Curr Biol. 4:761-63, Arbones et al., 1994, Immunity. 1:247-60, Green et al., 1994, Nat Genet. 7:13-21, Jakobovits et al., 1993, Nature. 362:255-58, Jakobovits et al., 1993, Proc Natl Acad Sci USA. 90:2551-55. Chen, J., M. Trounstine, F. W. Alt, F. Young, C. Kurahara, J. Loring, D. Huszar. Inter'l Immunol. 5 (1993): 647-656, Choi et al., 1993, Nature Genetics 4: 117-23, Fishwild et al., 1996, Nature Biotech. 14: 845-51, Harding et al., 1995, Annals of the New York Academy of Sciences, Lonberg et al., 1994, Nature 368: 856-59, Lonberg, 1994, Transgenic Approaches to Human Monoclonal Antibodies in Handbook of Experimental Pharmacology 113: 49-101, Lonberg et al., 1995, Internal Review of Immunology 13: 65-93, Neuberger, 1996, Nature Biotechnology 14: 826, Taylor et al., 1992, Nucleic Acids Res. 20: 6287-95, Taylor et al., 1994, Inter'l Immunol. 6: 579-91, Tomizuka et al., 1997, Nature Genetics 16: 133-43, Tomizuka et al., 2000, Pro. Nat'l Acad. Sci. USA 97: 722-27, Tuaillon et al., 1993, Pro. Nat'l Acad. Sci. USA 90: 3720-24, and Tuaillon et al., 1994, J. Immunol. 152: 2912-20.

[0179] Antigen binding proteins (e.g., antibodies, antibody fragments, and antibody derivatives) of the present disclosure can comprise any constant region known in the art. The light chain constant region can be, for example, a kappa- or lambda-type light chain constant region, e.g., a human kappa- or lambda-type light chain constant region. The heavy chain constant region can be, for example, an alpha-, delta-, epsilon-, gamma-, or mu-type heavy chain constant regions, e.g., a human alpha-, delta-, epsilon-, gamma-, or mu-type heavy chain constant region. In one embodiment, the light or heavy chain constant region is a fragment, derivative, variant, or mutein of a naturally occurring constant region.

[0180] Techniques are known for deriving an antibody of a different subclass or isotype from an antibody of interest, i.e., subclass switching. Thus, IgG antibodies may be derived from an IgM antibody, for example, and vice versa. Such techniques allow the preparation of new antibodies that possess the antigen-binding properties of a given antibody (the parent antibody), but also exhibit biological properties associated with an antibody isotype or subclass different from that of the parent antibody. Recombinant DNA techniques may be employed. Cloned DNA encoding particular antibody polypeptides may be employed in such procedures, e.g., DNA encoding the constant domain of an antibody of the desired isotype. See also Lantto et al., 2002, Methods Mol. Biol. 178:303-16.

[0181] In one embodiment, an antigen binding protein of the present disclosure comprises the IgG1 heavy chain domain of any of A1-A28 (H1-H28) or a fragment of the IgG1 heavy chain domain of any of A1-A28 (H1-H28). In another embodiment, an antigen binding protein of the present disclosure comprises the kappa light chain constant chain region of A1-A28 (L1-L28), or a fragment of the kappa light chain constant region of A1-A28 (L1-L28). In another embodiment, an antigen binding protein of the present disclosure comprises both the IgG1 heavy chain domain, or a fragment thereof, of A1-A28 (L1-L28) and the kappa light chain domain, or a fragment thereof, of A1-A28 (L1-L28).

[0182] Accordingly, the antigen binding proteins of the present disclosure include those comprising, for example, the variable domain combinations L1H1, L2H2, L3H3, L4H4, L5H5, L6H6, L7H7, L8H8, L9H9, L10H10, L11H11, L12H12, L13H13, . . . and L28H28, having a desired isotype (for example, IgA, IgG1, IgG2, IgG3, IgG4, IgM, IgE, and IgD) as well as Fab or F(ab′)2 fragments thereof. Moreover, if an IgG4 is desired, it may also be desired to introduce a point mutation (CPSCP (SEQ ID NO: 11969)->CPPCP (SEQ ID NO: 11970)) in the hinge region as described in Bloom et al., 1997, Protein Science 6:407, incorporated by reference herein) to alleviate a tendency to form intra-H chain disulfide bonds that can lead to heterogeneity in the IgG4 antibodies.

[0183] In one embodiment, the antigen binding protein has a K_{off} of 1×10⁻⁴ s⁻¹ or lower. In another embodiment, the K_{off} is 5×10⁻⁵ s⁻¹ or lower. In another embodiment, the K_{off} is substantially the same as an antibody having a combination of light chain and heavy chain variable domain sequences selected from the group of combinations consisting of L1H1, L2H2, L3H3, L4H4, L5H5, L6H6, . . . and L28H28. In another embodiment, the antigen binding protein binds to CTLA-4 with substantially the same K_{off} as an antibody that comprises one or more CDRs from an antibody having a combination of light chain and heavy chain variable domain sequences selected from the group of combinations consisting of L1H1, L2H2, L3H3, L4H4, L5H5, L6H6, . . . and L23H28. In another embodiment, the antigen binding protein binds to CTLA-4 with substantially the same K_{off} as an antibody that comprises one of the amino acid sequences illustrated above. In another embodiment, the antigen binding protein binds to CTLA-4 with substantially the same K_{off} as an antibody that comprises one or more CDRs from an antibody that comprises one of the amino acid sequences illustrated above.

[0184] In one aspect, the present disclosure provides antigen-binding fragments of an anti-CTLA-4 antibody of the present disclosure. Such fragments can consist entirely of antibody-derived sequences or can comprise additional sequences. Examples of antigen-binding fragments include Fab, F(ab′)2, single chain antibodies, diabodies, triabodies, tetrabodies, and domain antibodies. Other examples are provided in Lunde et al., 2002, Biochem. Soc. Trans. 30:500-06.

[0185] Single chain antibodies (scFv) may be formed by linking heavy and light chain variable domain (Fv region) fragments via an amino acid bridge (short peptide linker, e.g., a synthetic sequence of amino acid residues), resulting in a single polypeptide chain. Such single-chain Fvs (scFvs) have been prepared by fusing DNA encoding a peptide linker between DNAs encoding the two variable domain polypeptides (V_{L} and V_{H}). The resulting polypeptides can fold back on themselves to form antigen-binding monomers, or they can form multimers (e.g., dimers, trimers, or tetramers), depending on the length of a flexible linker between the two variable domains (Kortt et al., 1997, Prot. Eng. 10:423; Kortt et al., 2001, Biomol. Eng. 18:95-108, Bird et al., 1988, Science 242:423-26 and Huston et al., 1988, Proc. Natl. Acad. Sci. USA 85:5879-83). By combining different V_{L} and V_{H}-comprising polypeptides, one can form multimeric scFvs that bind to different epitopes (Kriangkum et al., 2001, Biomol. Eng. 18:31-40). Techniques developed for the production of single chain antibodies include those described in U.S. Pat. No. 4,946,778; Bird, 1988, Science 242:423; Huston et al., 1988, Proc. Natl. Acad. Sci. USA 85:5879; Ward et al., 1989, Nature 334:544, de Graaf et al., 2002, Methods Mol Biol. 178:379-87. ScFvs comprising the variable domain combinations L1H1, L2H2, L3H3, L4H4, L5H5, L6H6, . . . , and L28H28 are encompassed by the present disclosure.

### 7.7. Monoclonal Antibody

[0186] In another aspect, the present disclosure provides monoclonal antibodies that bind to CTLA-4. Monoclonal antibodies of the present disclosure may be generated using a variety of known techniques. In general, monoclonal antibodies that bind to specific antigens may be obtained by methods known to those skilled in the art (see, for example, Kohler et al., Nature 256:495, 1975; Coligan et al. (eds.), Current Protocols in Immunology, 1:2.5.12.6.7 (John Wiley & Sons 1991); U.S. Pat. Nos. RE 32,011, 4,902,614, 4,543,439, and 4,411,993; Monoclonal Antibodies, Hybridomas: A New Dimension in Biological Analyses, Plenum Press, Kennett, McKeam, and Bechtol (eds.) (1980); and Antibodies: A Laboratory Manual, Harlow and Lane (eds.), Cold Spring Harbor Laboratory Press (1988); Picksley et al., “Production of monoclonal antibodies against proteins expressed in E. coli,” in DNA Cloning 2: Expression Systems, 2nd Edition, Glover et al. (eds.), page 93 (Oxford University Press 1995)). Antibody fragments may be derived therefrom using any suitable standard technique such as proteolytic digestion, or optionally, by proteolytic digestion (for example, using papain or pepsin) followed by mild reduction of disulfide bonds and alkylation. Alternatively, such fragments may also be generated by recombinant genetic engineering techniques as described herein.

[0187] Monoclonal antibodies can be obtained by injecting an animal, for example, a rat, hamster, a rabbit, or preferably a mouse, including for example a transgenic or a knock-out, as known in the art, with an immunogen comprising human CTLA-4 [sequence SEQ ID 7001] or a fragment thereof, according to methods known in the art and described herein. The presence of specific antibody production may be monitored after the initial injection and/or after a booster injection by obtaining a serum sample and detecting the presence of an antibody that binds to human CTLA-4 or peptide using any one of several immunodetection methods known in the art and described herein. From animals producing the desired antibodies, lymphoid cells, most commonly cells from the spleen or lymph node, are removed to obtain B-lymphocytes. The B lymphocytes are then fused with a drug-sensitized myeloma cell fusion partner, preferably one that is syngeneic with the immunized animal and that optionally has other desirable properties (e.g., inability to express endogenous Ig gene products, e.g., P3X63-Ag 8.653 (ATCC No. CRL 1580); NSO, SP20) to produce hybridomas, which are immortal eukaryotic cell lines.

[0188] The lymphoid (e.g., spleen) cells and the myeloma cells may be combined for a few minutes with a membrane fusion-promoting agent, such as polyethylene glycol or a nonionic detergent, and then plated at low density on a selective medium that supports the growth of hybridoma cells but not unfused myeloma cells. A preferred selection media is HAT (hypoxanthine, aminopterin, thymidine). After a sufficient time, usually about one to two weeks, colonies of cells are observed. Single colonies are isolated, and antibodies produced by the cells may be tested for binding activity to human CTLA-4, using any one of a variety of immunoassays known in the art and described herein. The hybridomas are cloned (e.g., by limited dilution cloning or by soft agar plaque isolation) and positive clones that produce an antibody specific to CTLA-4 are selected and cultured. The monoclonal antibodies from the hybridoma cultures may be isolated from the supernatants of hybridoma cultures.

[0189] An alternative method for production of a murine monoclonal antibody is to inject the hybridoma cells into the peritoneal cavity of a syngeneic mouse, for example, a mouse that has been treated (e.g., pristane-primed) to promote formation of ascites fluid containing the monoclonal antibody. Monoclonal antibodies can be isolated and purified by a variety of well-established techniques. Such isolation techniques include affinity chromatography with Protein-A Sepharose, size-exclusion chromatography, and ion-exchange chromatography (see, for example, Coligan at pages 2.7.1-2.7.12 and pages 2.9.1-2.9.3; Baines et al., “Purification of Immunoglobulin G (IgG),” in Methods in Molecular Biology, Vol. 10, pages 79-104 (The Humana Press, Inc. 1992)). Monoclonal antibodies may be purified by affinity chromatography using an appropriate ligand selected based on particular properties of the antibody (e.g., heavy or light chain isotype, binding specificity, etc.). Examples of a suitable ligand, immobilized on a solid support, include Protein A, Protein G, an anticonstant region (light chain or heavy chain) antibody, an anti-idiotype antibody, and a TGF-beta binding protein, or fragment or variant thereof.

[0190] Monoclonal antibodies may be produced using any technique known in the art, e.g., by immortalizing spleen cells harvested from the transgenic animal after completion of the immunization schedule. The spleen cells can be immortalized using any technique known in the art, e.g., by fusing them with myeloma cells to produce hybridomas. Hybridoma cell lines are identified that produce an antibody that binds a CTLA-4 polypeptide. Such hybridoma cell lines, and anti-CTLA-4 monoclonal antibodies produced by them, are encompassed by the present disclosure. Myeloma cells for use in hybridoma-producing fusion procedures preferably are non-antibody-producing, have high fusion efficiency, and enzyme deficiencies that render them incapable of growing in certain selective media which support the growth of only the desired fused cells (hybridomas). Examples of suitable cell lines for use in mouse fusions include Sp-20, P3-X63/Ag8, P3-X63-Ag8.653, NS1/1.Ag 4 1, Sp210-Ag14, FO, NSO/U, MPC-11, MPC11-X45-GTG 1.7 and S194/5XX0 Bul; examples of cell lines used in rat fusions include R210.RCY3, Y3-Ag 1.2.3, IR983F and 4B210. Other cell lines useful for cell fusions are U-266, GM1500-GRG2, LICR-LON-HMy2 and UC729-6. Hybridomas or mAbs may be further screened to identify mAbs with particular properties, such as the ability to block a CTLA-4-induced activity.

[0191] An antibody of the present disclosure may also be a fully human monoclonal antibody. An isolated fully human antibody is provided that specifically binds to the CTLA-4, wherein the antigen binding protein possesses at least one in vivo biological activity of a human anti-CTLA-4 antibody.

### 7.8. Method of Generating Antibodies

[0192] Fully human monoclonal antibodies may be generated by any number of techniques with which those having ordinary skill in the art will be familiar. Such methods include, but are not limited to, Epstein Barr Virus (EBV) transformation of human peripheral blood cells (e.g., containing B lymphocytes), in vitro immunization of human B-cells, fusion of spleen cells from immunized transgenic mice carrying inserted human immunoglobulin genes, isolation from human immunoglobulin V region phage libraries, or other procedures as known in the art and based on the disclosure herein. For example, fully human monoclonal antibodies may be obtained from transgenic mice that have been engineered to produce specific human antibodies in response to antigenic challenge. Methods for obtaining fully human antibodies from transgenic mice are described, for example, by Green et al., Nature Genet. 7:13, 1994; Lonberg et al., Nature 368:856, 1994; Taylor et al., Int. Immun. 6:579, 1994; U.S. Pat. No. 5,877,397; Bruggemann et al., 1997 Curr. Opin. Biotechnol. 8:455-58; Jakobovits et al., 1995 Ann. N. Y. Acad. Sci. 764:525-35. In this technique, elements of the human heavy and light chain locus are introduced into strains of mice derived from embryonic stem cell lines that contain targeted disruptions of the endogenous heavy chain and light chain loci (see also Bruggemann et al., Curr. Opin. Biotechnol. 8:455-58 (1997)). For example, human immunoglobulin transgenes may be mini-gene constructs, or transloci on yeast artificial chromosomes, which undergo B-cell-specific DNA rearrangement and hypermutation in the mouse lymphoid tissue. Fully human monoclonal antibodies may be obtained by immunizing the transgenic mice, which may then produce human antibodies specific for CTLA-4. Lymphoid cells of the immunized transgenic mice can be used to produce human antibody-secreting hybridomas according to the methods described herein. Polyclonal sera containing fully human antibodies may also be obtained from the blood of the immunized animals.

[0193] Another method for generating human antibodies of the present disclosure includes immortalizing human peripheral blood cells by EBV transformation. See, e.g., U.S. Pat. No. 4,464,456. Such an immortalized B-cell line (or lymphoblastoid cell line) producing a monoclonal antibody that specifically binds to CTLA-4 can be identified by immunodetection methods as provided herein, for example, an ELISA, and then isolated by standard cloning techniques. The stability of the lymphoblastoid cell line producing an anti-CTLA-4 antibody may be improved by fusing the transformed cell line with a murine myeloma to produce a mouse-human hybrid cell line according to methods known in the art (see, e.g., Glasky et al., Hybridoma 8:377-89 (1989)). Still another method to generate human monoclonal antibodies is in vitro immunization, which includes priming human splenic B-cells with human CTLA-4, followed by fusion of primed B-cells with a heterohybrid fusion partner. See, e.g., Boerner et al., 1991 J Immunol. 147:86-95.

[0194] In certain embodiments, a B-cell that is producing an anti-human CTLA-4 antibody is selected and the light chain and heavy chain variable regions are cloned from the B-cell according to molecular biology techniques known in the art (WO 92/02551; U.S. Pat. No. 5,627,052; Babcook et al., Proc. Natl. Acad. Sci. USA 93:7843-48 (1996)) and described herein. B-cells from an immunized animal may be isolated from the spleen, lymph node, or peripheral blood sample by selecting a cell that is producing an antibody that specifically binds to CTLA-4. B-cells may also be isolated from humans, for example, from a peripheral blood sample.

[0195] Methods for detecting single B-cells that are producing an antibody with the desired specificity are well known in the art, for example, by plaque formation, fluorescence-activated cell sorting, in vitro stimulation followed by detection of specific antibody, and the like. Methods for selection of specific antibody-producing B-cells include, for example, preparing a single cell suspension of B-cells in soft agar that contains human CTLA-4. Binding of the specific antibody produced by the B-cell to the antigen results in the formation of a complex, which may be visible as an immunoprecipitate.

[0196] In some embodiments, specific antibody-producing B-cells are selected by using a method that allows identification natively paired antibodies. For example, a method described in Adler et al., A natively paired antibody library yields drug leads with higher sensitivity and specificity than a randomly paired antibody library, MAbs (2018), which is incorporated by reference in its entirety herein, can be employed. The method combines microfluidic technology, molecular genomics, yeast single-chain variable fragment (scFv) display, fluorescence-activated cell sorting (FACS) and deep sequencing as summarized in FIG. 1 adopted from Adler et al. In short, B cells can be isolated from immunized animals and then pooled. The B cells are encapsulated into droplets with oligo-dT beads and a lysis solution, and mRNA-bound beads are purified from the droplets, and then injected into a second emulsion with an OE-RT-PCR amplification mix that generates DNA amplicons that encode scFv with native pairing of heavy and light chain Ig. Libraries of natively paired amplicons are then electroporated into yeast for scFv display. FACS is used to identify high affinity scFv. Finally, deep antibody sequencing can be used to identify all clones in the pre- and post-sort scFv libraries.

[0197] After the B-cells producing the desired antibody are selected, the specific antibody genes may be cloned by isolating and amplifying DNA or mRNA according to methods known in the art and described herein.

[0198] The methods for obtaining antibodies of the present disclosure can also adopt various phage display technologies known in the art. See, e.g., Winter et al., 1994 Annu. Rev. Immunol. 12:433-55; Burton et al., 1994 Adv. Immunol. 57:191-280. Human or murine immunoglobulin variable region gene combinatorial libraries may be created in phage vectors that can be screened to select Ig fragments (Fab, Fv, sFv, or multimers thereof) that bind specifically to CTLA-4 binding protein or variant or fragment thereof. See, e.g., U.S. Pat. No. 5,223,409; Huse et al., 1989 Science 246:1275-81; Sastry et al., Proc. Natl. Acad. Sci. USA 86:5728-32 (1989); Alting-Mees et al., Strategies in Molecular Biology 3:1-9 (1990); Kang et al., 1991 Proc. Natl. Acad. Sci. USA 88:4363-66; Hoogenboom et al., 1992 J. Molec. Biol. 227:381-388; Schlebusch et al., 1997 Hybridoma 16:47-52 and references cited therein. For example, a library containing a plurality of polynucleotide sequences encoding Ig variable region fragments may be inserted into the genome of a filamentous bacteriophage, such as M13 or a variant thereof, in frame with the sequence encoding a phage coat protein. A fusion protein may be a fusion of the coat protein with the light chain variable region domain and/or with the heavy chain variable region domain. According to certain embodiments, immunoglobulin Fab fragments may also be displayed on a phage particle (see, e.g., U.S. Pat. No. 5,698,426).

[0199] Antibody fragments fused to another protein, such as a minor coat protein, can be also used to enrich phage with antigen. Then, using a random combinatorial library of rearranged heavy (V_{H}) and light (V_{L}) chains from mice immune to the antigen (e.g. CTLA-4), diverse libraries of antibody fragments are displayed on the surface of the phage. These libraries can be screened for complementary variable domains, and the domains purified by, for example, affinity column. See Clackson et al., Nature, V. 352 pp. 624-628 (1991).

[0200] Heavy and light chain immunoglobulin cDNA expression libraries may also be prepared in lambda phage, for example, using λImmunoZap™(H) and λImmunoZap™(L) vectors (Stratagene, La Jolla, California). Briefly, mRNA is isolated from a B-cell population, and used to create heavy and light chain immunoglobulin cDNA expression libraries in the λImmunoZap(H) and λImmunoZap(L) vectors. These vectors may be screened individually or co-expressed to form Fab fragments or antibodies (see Huse et al., supra; see also Sastry et al., supra). Positive plaques may subsequently be converted to a non-lytic plasmid that allows high level expression of monoclonal antibody fragments from E. coli.

[0201] In one embodiment, in a hybridoma the variable regions of a gene expressing a monoclonal antibody of interest are amplified using nucleotide primers. These primers may be synthesized by one of ordinary skill in the art, or may be purchased from commercially available sources. (See, e.g., Stratagene (La Jolla, California), which sells primers for mouse and human variable regions including, among others, primers for V_{Ha}, V_{Hb}, V_{Hc}, V_{Hd}, C_{H1}, V_{L} and C_{L} regions.) These primers may be used to amplify heavy or light chain variable regions, which may then be inserted into vectors such as ImmunoZAP™H or ImmunoZAP™L (Stratagene), respectively. These vectors may then be introduced into E. coli, yeast, or mammalian-based systems for expression. Large amounts of a single-chain protein containing a fusion of the V_{H} and V_{L} domains may be produced using these methods (see Bird et al., Science 242:423-426, 1988).

[0202] Once cells producing antibodies according to the disclosure have been obtained using any of the above-described immunization and other techniques, the specific antibody genes may be cloned by isolating and amplifying DNA or mRNA therefrom according to standard procedures as described herein. The antibodies produced therefrom may be sequenced and the CDRs identified and the DNA coding for the CDRs may be manipulated as described previously to generate other antibodies according to the disclosure.

[0203] CTLA-4 binding agents of the present disclosure preferably modulate CTLA-4 function in the cell-based assay described herein and/or the in vivo assay described herein and/or bind to one or more of the domains described herein and/or cross-block the binding of one of the antibodies described in this application and/or are cross-blocked from binding CTLA-4 by one of the antibodies described in this application. Accordingly such binding agents can be identified using the assays described herein.

[0204] In certain embodiments, antibodies are generated by first identifying antibodies that bind to one or more of the domains provided herein and/or neutralize in the cell-based and/or in vivo assays described herein and/or cross-block the antibodies described in this application and/or are cross-blocked from binding CTLA-4 by one of the antibodies described in this application. The CDR regions from these antibodies are then used to insert into appropriate biocompatible frameworks to generate CTLA-4 binding agents. The non-CDR portion of the binding agent may be composed of amino acids, or may be a non-protein molecule. The assays described herein allow the characterization of binding agents. Preferably the binding agents of the present disclosure are antibodies as defined herein.

[0205] Other antibodies according to the disclosure may be obtained by conventional immunization and cell fusion procedures as described herein and known in the art.

[0206] Molecular evolution of the complementarity determining regions (CDRs) in the center of the antibody binding site also has been used to isolate antibodies with increased affinity, for example, antibodies having increased affinity for c-erbB-2, as described by Schier et al., 1996, J. Mol. Biol. 263:551. Accordingly, such techniques are useful in preparing antibodies to CTLA-4. Antigen binding proteins directed against a CTLA-4 can be used, for example, in assays to detect the presence of CTLA-4 polypeptides, either in vitro or in vivo. The antigen binding proteins also may be employed in purifying CTLA-4 proteins by immunoaffinity chromatography.

[0207] Although human, partially human, or humanized antibodies will be suitable for many applications, particularly those involving administration of the antibody to a human subject, other types of antigen binding proteins will be suitable for certain applications. Non-human antibodies of the present disclosure can be, for example, derived from any antibody-producing animal, such as mouse, rat, rabbit, goat, donkey, or non-human primate (such as monkey (e.g., cynomolgus or rhesus monkey) or ape (e.g., chimpanzee)). An antibody from a particular species can be made by, for example, immunizing an animal of that species with the desired immunogen (e.g., a CTLA-4 polypeptide) or using an artificial system for generating antibodies of that species (e.g., a bacterial or phage display-based system for generating antibodies of a particular species), or by converting an antibody from one species into an antibody from another species by replacing, e.g., the constant region of the antibody with a constant region from the other species, or by replacing one or more amino acid residues of the antibody so that it more closely resembles the sequence of an antibody from the other species. In one embodiment, the antibody is a chimeric antibody comprising amino acid sequences derived from antibodies from two or more different species.

[0208] Antigen binding proteins may be prepared, and screened for desired properties, by any of a number of conventional techniques. Certain of the techniques involve isolating a nucleic acid encoding a polypeptide chain (or portion thereof) of an antigen binding protein of interest (e.g., an anti-CTLA-4 antibody), and manipulating the nucleic acid through recombinant DNA technology. The nucleic acid may be fused to another nucleic acid of interest, or altered (e.g., by mutagenesis or other conventional techniques) to add, delete, or substitute one or more amino acid residues, for example. Furthermore, the antigen binding proteins may be purified from cells that naturally express them (e.g., an antibody can be purified from a hybridoma that produces it), or produced in recombinant expression systems, using any technique known in the art. See, for example, Monoclonal Antibodies, Hybridomas: A New Dimension in Biological Analyses, Kennet et al. (eds.), Plenum Press, New York (1980); and Antibodies: A Laboratory Manual, Harlow and Land (eds.), Cold Spring Harbor Laboratory Press, Cold Spring Harbor, NY, (1988).

[0209] Any expression system known in the art can be used to make the recombinant polypeptides of the present disclosure. Expression systems are detailed comprehensively above. In general, host cells are transformed with a recombinant expression vector that comprises DNA encoding a desired polypeptide. Among the host cells that may be employed are prokaryotes, yeast or higher eukaryotic cells. Prokaryotes include gram negative or gram positive organisms, for example E. coli or Bacilli. Higher eukaryotic cells include insect cells and established cell lines of mammalian origin. Examples of suitable mammalian host cell lines include the COS-7 line of monkey kidney cells (ATCC CRL 1651) (Gluzman et al., 1981, Cell 23:175), L cells, 293 cells, C127 cells, 3T3 cells (ATCC CCL 163), Chinese hamster ovary (CHO) cells, HeLa cells, BHK (ATCC CRL 10) cell lines, and the CV1/EBNA cell line derived from the African green monkey kidney cell line CV1 (ATCC CCL 70) as described by McMahan et al., 1991, EMBO J. 10: 2821. Appropriate cloning and expression vectors for use with bacterial, fungal, yeast, and mammalian cellular hosts are described by Pouwels et al. (Cloning Vectors: A Laboratory Manual, Elsevier, New York, 1985).

[0210] It will be appreciated that an antibody of the present disclosure may have at least one amino acid substitution, providing that the antibody retains binding specificity. Therefore, modifications to the antibody structures are encompassed within the scope of the present disclosure. These may include amino acid substitutions, which may be conservative or non-conservative that do not destroy the CTLA-4 binding capability of an antibody. Conservative amino acid substitutions may encompass non-naturally occurring amino acid residues, which are typically incorporated by chemical peptide synthesis rather than by synthesis in biological systems. These include peptidomimetics and other reversed or inverted forms of amino acid moieties. A conservative amino acid substitution may also involve a substitution of a native amino acid residue with a normative residue such that there is little or no effect on the polarity or charge of the amino acid residue at that position.

[0211] Non-conservative substitutions may involve the exchange of a member of one class of amino acids or amino acid mimetics for a member from another class with different physical properties (e.g. size, polarity, hydrophobicity, charge). Such substituted residues may be introduced into regions of the human antibody that are homologous with non-human antibodies, or into the non-homologous regions of the molecule.

[0212] Moreover, one skilled in the art may generate test variants containing a single amino acid substitution at each desired amino acid residue. The variants can then be screened using activity assays known to those skilled in the art. Such variants could be used to gather information about suitable variants. For example, if one discovered that a change to a particular amino acid residue resulted in destroyed, undesirably reduced, or unsuitable activity, variants with such a change may be avoided. In other words, based on information gathered from such routine experiments, one skilled in the art can readily determine the amino acids where further substitutions should be avoided either alone or in combination with other mutations.

[0213] A skilled artisan will be able to determine suitable variants of the polypeptide as set forth herein using well-known techniques. In certain embodiments, one skilled in the art may identify suitable areas of the molecule that may be changed without destroying activity by targeting regions not believed to be important for activity. In certain embodiments, one can identify residues and portions of the molecules that are conserved among similar polypeptides. In certain embodiments, even areas that may be important for biological activity or for structure may be subject to conservative amino acid substitutions without destroying the biological activity or without adversely affecting the polypeptide structure.

[0214] Additionally, one skilled in the art can review structure-function studies identifying residues in similar polypeptides that are important for activity or structure. In view of such a comparison, one can predict the importance of amino acid residues in a protein that correspond to amino acid residues which are important for activity or structure in similar proteins. One skilled in the art may opt for chemically similar amino acid substitutions for such predicted important amino acid residues.

[0215] One skilled in the art can also analyze the three-dimensional structure and amino acid sequence in relation to that structure in similar polypeptides. In view of such information, one skilled in the art may predict the alignment of amino acid residues of an antibody with respect to its three dimensional structure. In certain embodiments, one skilled in the art may choose not to make radical changes to amino acid residues predicted to be on the surface of the protein, since such residues may be involved in important interactions with other molecules.

[0216] A number of scientific publications have been devoted to the prediction of secondary structure. See Moult J., Curr. Op. in Biotech., 7(4):422-427 (1996), Chou et al., Biochem., 13(2):222-245 (1974); Chou et al., Biochem., 113(2):211-222 (1974); Chou et al., Adv. Enzymol. Relat. Areas Mol. Biol., 47:45-148 (1978); Chou et al., Ann. Rev. Biochem., 47:251-276 and Chou et al., Biophys. J., 26:367-384 (1979). Moreover, computer programs are currently available to assist with predicting secondary structure. One method of predicting secondary structure is based upon homology modeling. For example, two polypeptides or proteins which have a sequence identity of greater than 30%, or similarity greater than 40% often have similar structural topologies. The recent growth of the protein structural database (PDB) has provided enhanced predictability of secondary structure, including the potential number of folds within a polypeptide's or protein's structure. See Holm et al., Nucl. Acid. Res., 27(1):244-247 (1999). It has been suggested (Brenner et al., Curr. Op. Struct. Biol., 7(3):369-376 (1997)) that there are a limited number of folds in a given polypeptide or protein and that once a critical number of structures have been resolved, structural prediction will become dramatically more accurate.

[0217] Additional methods of predicting secondary structure include “threading” (Jones, D., Curr. Opin. Struct. Biol., 7(3):377-87 (1997); Sippl et al., Structure, 4(1):15-19 (1996)), “profile analysis” (Bowie et al., Science, 253:164-170 (1991); Gribskov et al., Meth. Enzym., 183:146-159 (1990); Gribskov et al., Proc. Nat. Acad. Sci., 84(13):4355-4358 (1987)), and “evolutionary linkage” (See Holm, supra (1999), and Brenner, supra (1997)).

[0218] In certain embodiments, variants of antibodies include glycosylation variants wherein the number and/or type of glycosylation site has been altered compared to the amino acid sequences of a parent polypeptide. In certain embodiments, variants comprise a greater or a lesser number of N-linked glycosylation sites than the native protein. An N-linked glycosylation site is characterized by the sequence: Asn-X-Ser or Asn-X-Thr, wherein the amino acid residue designated as X can be any amino acid residue except proline. The substitution of amino acid residues to create this sequence provides a potential new site for the addition of an N-linked carbohydrate chain. Alternatively, substitutions which eliminate this sequence will remove an existing N-linked carbohydrate chain. Also provided is a rearrangement of N-linked carbohydrate chains wherein one or more N-linked glycosylation sites (typically those that are naturally occurring) are eliminated and one or more new N-linked sites are created. Additional preferred antibody variants include cysteine variants wherein one or more cysteine residues are deleted from or substituted for another amino acid (e.g., serine) as compared to the parent amino acid sequence. Cysteine variants can be useful when antibodies must be refolded into a biologically active conformation such as after the isolation of insoluble inclusion bodies. Cysteine variants generally have fewer cysteine residues than the native protein, and typically have an even number to minimize interactions resulting from unpaired cysteines.

[0219] Desired amino acid substitutions (whether conservative or non-conservative) can be determined by those skilled in the art at the time such substitutions are desired. In certain embodiments, amino acid substitutions can be used to identify important residues of antibodies to CTLA-4, or to increase or decrease the affinity of the antibodies to CTLA-4 described herein.

[0220] According to certain embodiments, preferred amino acid substitutions are those which: (1) reduce susceptibility to proteolysis, (2) reduce susceptibility to oxidation, (3) alter binding affinity for forming protein complexes, (4) alter binding affinities, and/or (4) confer or modify other physiochemical or functional properties on such polypeptides. According to certain embodiments, single or multiple amino acid substitutions (in certain embodiments, conservative amino acid substitutions) may be made in the naturally-occurring sequence (in certain embodiments, in the portion of the polypeptide outside the domain(s) forming intermolecular contacts). In certain embodiments, a conservative amino acid substitution typically may not substantially change the structural characteristics of the parent sequence (e.g., a replacement amino acid should not tend to break a helix that occurs in the parent sequence, or disrupt other types of secondary structure that characterizes the parent sequence). Examples of art-recognized polypeptide secondary and tertiary structures are described in Proteins, Structures and Molecular Principles (Creighton, Ed., W. H. Freeman and Company, New York (1984)); Introduction to Protein Structure (C. Branden and J. Tooze, eds., Garland Publishing, New York, N.Y. (1991)); and Thornton et al. Nature 354:105 (1991), which are each incorporated herein by reference.

[0221] In certain embodiments, antibodies of the present disclosure may be chemically bonded with polymers, lipids, or other moieties.

[0222] The binding agents may comprise at least one of the CDRs described herein incorporated into a biocompatible framework structure. In one example, the biocompatible framework structure comprises a polypeptide or portion thereof that is sufficient to form a conformationally stable structural support, or framework, or scaffold, which is able to display one or more sequences of amino acids that bind to an antigen (e.g., CDRs, a variable region, etc.) in a localized surface region. Such structures can be a naturally occurring polypeptide or polypeptide “fold” (a structural motif), or can have one or more modifications, such as additions, deletions or substitutions of amino acids, relative to a naturally occurring polypeptide or fold. These scaffolds can be derived from a polypeptide of any species (or of more than one species), such as a human, other mammal, other vertebrate, invertebrate, plant, bacteria or virus.

[0223] Typically the biocompatible framework structures are based on protein scaffolds or skeletons other than immunoglobulin domains. For example, those based on fibronectin, ankyrin, lipocalin, neocarzinostain, cytochrome b, CP1 zinc finger, PST1, coiled coil, LACI-D1, Z domain and tendamistat domains may be used (See e.g., Nygren and Uhlen, 1997, Curr. Opin. in Struct. Biol., 7, 463-469).

[0224] Humanized antibodies can be produced using techniques known to those skilled in the art (Zhang, W., et al., Molecular Immunology. 42(12):1445-1451, 2005; Hwang W. et al., Methods. 36(1):35-42, 2005; Dall' Acqua W F, et al., Methods 36(1):43-60, 2005; and Clark, M., Immunology Today. 21(8):397-402, 2000).

[0225] Additionally, one skilled in the art will recognize that suitable binding agents include portions of these antibodies, such as one or more of CDR1-L1 to 28 with SEQ ID NOS 1001-1028; CDR2-L1 to 28 with SEQ ID NOS 2001-2028; CDR3-L1 to 28 with SEQ ID NOS 3001-3028; CDR1-H1 to 28 with SEQ ID NOS 4001-4028; CDR2-H1 to 28 with SEQ ID NOS 5001-5028; and CDR3-H1 to 28 with SEQ ID NOS 6001-6028, as specifically disclosed herein. At least one of the regions of CDR regions may have at least one amino acid substitution from the sequences provided here, provided that the antibody retains the binding specificity of the non-substituted CDR. The non-CDR portion of the antibody may be a non-protein molecule, wherein the binding agent cross-blocks the binding of an antibody disclosed herein to CTLA-4 and/or neutralizes CTLA-4. The non-CDR portion of the antibody may be a non-protein molecule in which the antibody exhibits a similar binding pattern to human CTLA-4 peptides in a competition binding assay as that exhibited by at least one of antibodies A1-A28, and/or neutralizes CTLA-4. The non-CDR portion of the antibody may be composed of amino acids, wherein the antibody is a recombinant binding protein or a synthetic peptide, and the recombinant binding protein cross-blocks the binding of an antibody disclosed herein to CTLA-4 and/or neutralizes CTLA-4. The non-CDR portion of the antibody may be composed of amino acids, wherein the antibody is a recombinant antibody, and the recombinant antibody exhibits a similar binding pattern to human CTLA-4 peptides in the human CTLA-4 peptide epitope competition binding assay (described hereinbelow) as that exhibited by at least one of the antibodies A1-A28, and/or neutralizes CTLA-4.

[0226] Where an antibody comprises one or more of CDR1-H, CDR2-H, CDR3-H, CDR1-L, CDR2-L and CDR3-L as described above, it may be obtained by expression from a host cell containing DNA coding for these sequences. A DNA coding for each CDR sequence may be determined on the basis of the amino acid sequence of the CDR and synthesized together with any desired antibody variable region framework and constant region DNA sequences using oligonucleotide synthesis techniques, site-directed mutagenesis and polymerase chain reaction (PCR) techniques as appropriate. DNA coding for variable region frameworks and constant regions is widely available to those skilled in the art from genetic sequences databases such as GenBank®.

[0227] Once synthesized, the DNA encoding an antibody of the present disclosure or fragment thereof may be propagated and expressed according to any of a variety of well-known procedures for nucleic acid excision, ligation, transformation, and transfection using any number of known expression vectors. Thus, in certain embodiments expression of an antibody fragment may be preferred in a prokaryotic host, such as Escherichia coli (see, e.g., Pluckthun et al., 1989 Methods Enzymol. 178:497-515). In certain other embodiments, expression of the antibody or a fragment thereof may be preferred in a eukaryotic host cell, including yeast (e.g., Saccharomyces cerevisiae, Schizosaccharomyces pombe, and Pichia pastoris), animal cells (including mammalian cells) or plant cells. Examples of suitable animal cells include, but are not limited to, myeloma (such as a mouse NSO line), COS, CHO, or hybridoma cells. Examples of plant cells include tobacco, corn, soybean, and rice cells.

[0228] One or more replicable expression vectors containing DNA encoding an antibody variable and/or constant region may be prepared and used to transform an appropriate cell line, for example, a non-producing myeloma cell line, such as a mouse NSO line or a bacteria, such as E. coli, in which production of the antibody will occur. In order to obtain efficient transcription and translation, the DNA sequence in each vector should include appropriate regulatory sequences, particularly a promoter and leader sequence operatively linked to the variable domain sequence. Particular methods for producing antibodies in this way are generally well-known and routinely used. For example, basic molecular biology procedures are described by Maniatis et al. (Molecular Cloning, A Laboratory Manual, 2nd ed., Cold Spring Harbor Laboratory, New York, 1989; see also Maniatis et al, 3rd ed., Cold Spring Harbor Laboratory, New York, (2001)). DNA sequencing can be performed as described in Sanger et al. (PNAS 74:5463, (1977)) and the Amersham International plc sequencing handbook, and site directed mutagenesis can be carried out according to methods known in the art (Kramer et al., Nucleic Acids Res. 12:9441, (1984); Kunkel Proc. Natl. Acad. Sci. USA 82:488-92 (1985); Kunkel et al., Methods in Enzymol. 154:367-82 (1987); the Anglian Biotechnology Ltd. handbook). Additionally, numerous publications describe techniques suitable for the preparation of antibodies by manipulation of DNA, creation of expression vectors, and transformation and culture of appropriate cells (Mountain A and Adair, J R in Biotechnology and Genetic Engineering Reviews (ed. Tombs, M P, 10, Chapter 1, 1992, Intercept, Andover, UK); “Current Protocols in Molecular Biology”, 1999, F. M. Ausubel (ed.), Wiley Interscience, New York).

[0229] Where it is desired to improve the affinity of antibodies according to the disclosure containing one or more of the above-mentioned CDRs can be obtained by a number of affinity maturation protocols including maintaining the CDRs (Yang et al., J Mol. Biol., 254, 392-403, 1995), chain shuffling (Marks et al., Bio/Technology, 10, 779-783, 1992), use of mutation strains of E. coli. (Low et al., J Mol. Biol., 250, 350-368, 1996), DNA shuffling (Patten et al., Curr. Opin. Biotechnol., 8, 724-733, 1997), phage display (Thompson et al., J Mol. Biol., 256, 7-88, 1996) and sexual PCR (Crameri, et al., Nature, 391, 288-291, 1998). All of these methods of affinity maturation are discussed by Vaughan et al. (Nature Biotech., 16, 535-539, 1998).

[0230] It will be understood by one skilled in the art that some proteins, such as antibodies, may undergo a variety of posttranslational modifications. The type and extent of these modifications often depends on the host cell line used to express the protein as well as the culture conditions. Such modifications may include variations in glycosylation, methionine oxidation, diketopiperizine formation, aspartate isomerization and asparagine deamidation. A frequent modification is the loss of a carboxy-terminal basic residue (such as lysine or arginine) due to the action of carboxypeptidases (as described in Harris, R. J. Journal of Chromatography 705:129-134, 1995).

### 7.9. Sequences

[0231] Antibodies A1-A28 comprise heavy and light chain V(J)D polynucleotides (also referred to herein as L1-L28 and H1-H28, respectively). Antibodies A1-A28 comprise the sequences listed in TABLE 5. For example, antibody A1 comprises light chain L1 (SEQ ID NO:1) and heavy chain H1 (SEQ ID NO:101). CDR sequences in the light chain (L1-L28) and heavy chain (H1-H28) are also provided with a specific SEQ ID NOs. For example, three CDR sequences (CDR1, CDR 2 and CDR3) for L1 are CDR1-L1 (SEQ ID NO:1001), CDR2-L1 (SEQ ID NO:2001) and CDR3-L1 (SEQ ID NO:3001), respectively and three CDR sequences (CDR1, CDR 2 and CDR3) for H1 are CDR1-H1 (SEQ ID NO:4001), CDR2-H1 (SEQ ID NO:5001) and CDR3-H1 (SEQ ID NO:6001).

TABLE 5

| Antibodies | Light Chain | Heavy Chain |
|---|---|---|
| A1 | L1 (SEQ ID NO: 1) | H1 (SEQ ID NO: 101) |
| | L1 comprises CDR1-L1 (SEQ ID NO: 1001), CDR2- | H1 comprises CDR1-H1 (SEQ ID NO: |
| | L1 (SEQ ID NO: 2001) and CDR3-L1 (SEQ ID | 4001), CDR2-H1 (SEQ ID NO: 5001) and |
| | NO: 3001) | CDR3-H1 (SEQ ID NO: 6001) |
| A2 | L2 (SEQ ID NO: 2) | H2 (SEQ ID NO: 102) |
| | L2 comprises CDR1-L2 (SEQ ID NO: 1002), CDR2- | He comprises CDR1-H2 (SEQ ID NO: |
| | L2 (SEQ ID NO: 2002) and CDR3-L2 (SEQ ID | 4002), CDR2-H2 (SEQ ID NO: 5002) and |
| | NO: 3002) | CDR3-H2 (SEQ ID NO: 6002) |
| A3 | L3 (SEQ ID NO: 3) | H3 (SEQ ID NO: 103) |
| | L3 comprises CDR1-L3 (SEQ ID NO: 1003), CDR2- | H3 comprises CDR1-H3 (SEQ ID |
| | L3 (SEQ ID NO: 2003) and CDR3-L3 (SEQ ID | NO: 4003), CDR2-H3 (SEQ ID NO: 5003) |
| | NO: 3003) | and CDR3-H3 (SEQ ID NO: 6003) |
| A4 | L4 (SEQ ID NO: 4) | H4 (SEQ ID NO: 104) |
| | L4 comprises CDR1-L4 (SEQ ID NO: 1004), CDR2- | H4 comprises CDR1-H4 (SEQ ID |
| | L4 (SEQ ID NO: 2004) and CDR3-L4 (SEQ ID | NO: 4004), CDR2-H4 (SEQ ID NO: 5004) |
| | NO: 3004) | and CDR3-H4 (SEQ ID NO: 6004) |
| A5 | L5 (SEQ ID NO: 5) | H5 (SEQ ID NO: 105) |
| | L5 comprises CDR1-L5 (SEQ ID NO: 1005), CDR2- | H4 comprises CDR1-H5 (SEQ ID |
| | L5 (SEQ ID NO: 2005) and CDR3-L5 (SEQ ID | NO: 4005), CDR2-H5 (SEQ ID NO: 5005) |
| | NO: 3005) | and CDR3-H5 (SEQ ID NO: 6005) |
| A6 | L6 (SEQ ID NO: 6) | H6 (SEQ ID NO: 106) |
| | L6 comprises CDR1-L6 (SEQ ID NO: 1006), CDR2- | H6 comprises CDR1-H6 (SEQ ID |
| | L6 (SEQ ID NO: 2006) and CDR3-L6 (SEQ ID | NO: 4006), CDR2-H6 (SEQ ID NO: 5006) |
| | NO: 3006) | and CDR3-H6 (SEQ ID NO: 6006) |
| A7 | L7 (SEQ ID NO: 7) | H7 (SEQ ID NO: 107) |
| | L7 comprises CDR1-L7 (SEQ ID NO: 1007), CDR2- | H7 comprises CDR1-H7 (SEQ ID |
| | L7 (SEQ ID NO: 2007) and CDR3-L7 (SEQ ID | NO: 4007), CDR2-H7 (SEQ ID NO: 5007) |
| | NO: 3007) | and CDR3-H7 (SEQ ID NO: 6007) |
| A8 | L8 (SEQ ID NO: 8) | H8 (SEQ ID NO: 108) |
| | L8 comprises CDR1-L8 (SEQ ID NO: 1008), CDR2- | H8 comprises CDR1-H8 (SEQ ID |
| | L8 (SEQ ID NO: 2008) and CDR3-L6 (SEQ ID | NO: 4008), CDR2-H8 (SEQ ID NO: 5008) |
| | NO: 3008) | and CDR3-H8 (SEQ ID NO: 6008) |
| A9 | L9 (SEQ ID NO: 9) | H9 (SEQ ID NO: 109) |
| | L9 comprises CDR1-L9 (SEQ ID NO: 1009), CDR2- | H9 comprises CDR1-H9 (SEQ ID |
| | L9 (SEQ ID NO: 2009) and CDR3-L9 (SEQ ID | NO: 4009), CDR2-H9 (SEQ ID NO: 5009) |
| | NO: 3009) | and CDR3-H9 (SEQ ID NO: 6009) |
| A10 | L10 (SEQ ID NO: 10) | H10 (SEQ ID NO: 110) |
| | L10 comprises CDR1-L10 (SEQ ID NO: 1010), | H10 comprises CDR1-H10 (SEQ ID |
| | CDR2-L10 (SEQ ID NO: 2010) and CDR3-L10 (SEQ | NO: 4010), CDR2-H10 (SEQ ID |
| | ID NO: 3010) | NO: 5010) and CDR3-H10 (SEQ ID |
| | | NO: 6010) |
| A11 | L11 (SEQ ID NO: 11) | H11 (SEQ ID NO: 111) |
| | L11 comprises CDR1-L11 (SEQ ID NO: 1011), | H11 comprises CDR1-H11 (SEQ ID |
| | CDR2-L11 (SEQ ID NO: 2011) and CDR3-L11 (SEQ | NO: 4011), CDR2-H11 (SEQ ID |
| | ID NO: 3011) | NO: 5011) and CDR3-H11 (SEQ ID |
| | | NO: 6011) |
| A12 | L12 (SEQ ID NO: 12) | H12 (SEQ ID NO: 112) |
| | L12 comprises CDR1-L12 (SEQ ID NO: 1012), | H12 comprises CDR1-H12 (SEQ ID |
| | CDR2-L12 (SEQ ID NO: 2012) and CDR3-L12 (SEQ | NO: 4012), CDR2-H12 (SEQ ID |
| | ID NO: 3012) | NO: 5012) and CDR3-H12 (SEQ ID |
| | | NO: 6012) |
| A13 | L13 (SEQ ID NO: 13) | H13 (SEQ ID NO: 113) |
| | L13 comprises CDR1-L13 (SEQ ID NO: 1013), | H13 comprises CDR1-H13 (SEQ ID |
| | CDR2-L13 (SEQ ID NO: 2013) and CDR3-L13 (SEQ | NO: 4013), CDR2-H13 (SEQ ID |
| | ID NO: 3013) | NO: 5013) and CDR3-H13 (SEQ ID |
| | | NO: 6013) |
| A14 | L14 (SEQ ID NO: 14) | H14 (SEQ ID NO: 114) |
| | L14 comprises CDR1-L14 (SEQ ID NO: 1014), | H14 comprises CDR1-H14 (SEQ ID |
| | CDR2-L14 (SEQ ID NO: 2014) and CDR3-L14 (SEQ | NO: 4014), CDR2-H14 (SEQ ID |
| | ID NO: 3014) | NO: 5014) and CDR3-H14 (SEQ ID |
| | | NO: 6014) |
| A15 | L15 (SEQ ID NO: 15) | H15 (SEQ ID NO: 115) |
| | L15 comprises CDR1-L15 (SEQ ID NO: 1015), | H15 comprises CDR1-H15 (SEQ ID |
| | CDR2-L15 (SEQ ID NO: 2015) and CDR3-L15 (SEQ | NO: 4015), CDR2-H15 (SEQ ID |
| | ID NO: 3015) | NO: 5015) and CDR3-H15 (SEQ ID |
| | | NO: 6015) |
| A16 | L16 (SEQ ID NO: 16) | H16 (SEQ ID NO: 116) |
| | L16 comprises CDR1-L16 (SEQ ID NO: 1016), | H16 comprises CDR1-H16 (SEQ ID |
| | CDR2-L16 (SEQ ID NO: 2016) and CDR3-L16 (SEQ | NO: 4016), CDR2-H16 (SEQ ID |
| | ID NO: 3016) | NO: 5016) and CDR3-H16 (SEQ ID |
| | | NO: 6016) |
| A17 | L17 (SEQ ID NO: 17) | H17 (SEQ ID NO: 117) |
| | L17 comprises CDR1-L17 (SEQ ID NO: 1017), | H17 comprises CDR1-H17 (SEQ ID |
| | CDR2-L17 (SEQ ID NO: 2017) and CDR3-L17 (SEQ | NO: 4017), CDR2-H17 (SEQ ID |
| | ID NO: 3017) | NO: 5017) and CDR3-H17 (SEQ ID |
| | | NO: 6017) |
| A18 | L18 (SEQ ID NO: 18) | H18 (SEQ ID NO: 118) |
| | L18 comprises CDR1-L18 (SEQ ID NO: 1018), | H18 comprises CDR1-H18 (SEQ ID |
| | CDR2-L18 (SEQ ID NO: 2018) and CDR3-L18 (SEQ | NO: 4018), CDR2-H18 (SEQ ID |
| | ID NO: 3018) | NO: 5018) and CDR3-H18 (SEQ ID |
| | | NO: 6018) |
| A19 | L19 (SEQ ID NO: 19) | H19 (SEQ ID NO: 119) |
| | L19 comprises CDR1-L19 (SEQ ID NO: 1019), | H19 comprises CDR1-H19 (SEQ ID |
| | CDR2-L19 (SEQ ID NO: 2019) and CDR3-L19 (SEQ | NO: 4019), CDR2-H19 (SEQ ID |
| | ID NO: 3019) | NO: 5019) and CDR3-H19 (SEQ ID |
| | | NO: 6019) |
| A20 | L20 (SEQ ID NO: 20) | H20 (SEQ ID NO: 120) |
| | L20 comprises CDR1-L20 (SEQ ID NO: 1020), | H20 comprises CDR1-H20 (SEQ ID |
| | CDR2-L20 (SEQ ID NO: 2020) and CDR3-L20 (SEQ | NO: 4020), CDR2-H20 (SEQ ID |
| | ID NO: 3020) | NO: 5020) and CDR3-H20 (SEQ ID |
| | | NO: 6020) |
| A21 | L21 (SEQ ID NO: 21) | H21 (SEQ ID NO: 121) |
| | L21 comprises CDR1-L21 (SEQ ID NO: 1021), | H21 comprises CDR1-H21 (SEQ ID |
| | CDR2-L21 (SEQ ID NO: 2021) and CDR3-L21 (SEQ | NO: 4021), CDR2-H21 (SEQ ID |
| | ID NO: 3021) | NO: 5021) and CDR3-H21 (SEQ ID |
| | | NO: 6021) |
| A22 | L22 (SEQ ID NO: 22) | H22 (SEQ ID NO: 122) |
| | L22 comprises CDR1-L22 (SEQ ID NO: 1022), | H22 comprises CDR1-H22 (SEQ ID |
| | CDR2-L22 (SEQ ID NO: 2022) and CDR3-L22 (SEQ | NO: 4022), CDR2-H22 (SEQ ID |
| | ID NO: 3022) | NO: 5022) and CDR3-H22 (SEQ ID |
| | | NO: 6022) |
| A23 | L23 (SEQ ID NO: 23) | H23 (SEQ ID NO: 123) |
| | L23 comprises CDR1-L23 (SEQ ID NO: 1023), | H23 comprises CDR1-H23 (SEQ ID |
| | CDR2-L23 (SEQ ID NO: 2023) and CDR3-L23 (SEQ | NO: 4023), CDR2-H23 (SEQ ID |
| | ID NO: 3023) | NO: 5023) and CDR3-H23 (SEQ ID |
| | | NO: 6023) |
| A24 | L24 (SEQ ID NO: 24) | H24 (SEQ ID NO: 124) |
| | L24 comprises CDR1-L24 (SEQ ID NO: 1024), | H24 comprises CDR1-H24 (SEQ ID |
| | CDR2-L24 (SEQ ID NO: 2024) and CDR3-L24 (SEQ | NO: 4024), CDR2-H24 (SEQ ID |
| | ID NO: 3024) | NO: 5024) and CDR3-H24 (SEQ ID |
| | | NO: 6024) |
| A25 | L25 (SEQ ID NO: 25) | H25 (SEQ ID NO: 125) |
| | L25 comprises CDR1-L25 (SEQ ID NO: 1025), | H25 comprises CDR1-H25 (SEQ ID |
| | CDR2-L25 (SEQ ID NO: 2025) and CDR3-L25 (SEQ | NO: 4025), CDR2-H25 (SEQ ID |
| | ID NO: 3025) | NO: 5025) and CDR3-H25 (SEQ ID |
| | | NO: 6025) |
| A26 | L26 (SEQ ID NO: 26) | H26 (SEQ ID NO: 126) |
| | L26 comprises CDR1-L26 (SEQ ID NO: 1026), | H26 comprises CDR1-H26 (SEQ ID |
| | CDR2-L26 (SEQ ID NO: 2026) and CDR3-L26 (SEQ | NO: 4026), CDR2-H26 (SEQ ID |
| | ID NO: 3026) | NO: 5026) and CDR3-H26 (SEQ ID |
| | | NO: 6026) |
| A27 | L27 (SEQ ID NO: 27) | H27 (SEQ ID NO: 127) |
| | L27 comprises CDR1-L27 (SEQ ID NO: 1027), | H27 comprises CDR1-H27 (SEQ ID |
| | CDR2-L27 (SEQ ID NO: 2027) and CDR3-L27 (SEQ | NO: 4027), CDR2-H27 (SEQ ID |
| | ID NO: 3027) | NO: 5027) and CDR3-H27 (SEQ ID |
| | | NO: 6027) |
| A28 | L28 (SEQ ID NO: 28) | H28 (SEQ ID NO: 128) |
| | L28 comprises CDR1-L28 (SEQ ID NO: 1028), | H28 comprises CDR1-H28 (SEQ ID |
| | CDR2-L28 (SEQ ID NO: 2028) and CDR3-L28 (SEQ | NO: 4028), CDR2-H28 (SEQ ID |
| | ID NO: 3028) | NO: 5028) and CDR3-H28 (SEQ ID |
| | | NO: 6028) |

### 7.10. Pharmaceutical Compositions

[0232] Pharmaceutical compositions containing the proteins and polypeptides of the present disclosure are also provided. Such compositions comprise a therapeutically or prophylactically effective amount of the polypeptide or protein in a mixture with pharmaceutically acceptable materials, and physiologically acceptable formulation materials.

[0233] The pharmaceutical composition may contain formulation materials for modifying, maintaining or preserving, for example, the pH, osmolarity, viscosity, clarity, color, isotonicity, odor, sterility, stability, rate of dissolution or release, adsorption or penetration of the composition.

[0234] Suitable formulation materials include, but are not limited to, amino acids (such as glycine, glutamine, asparagine, arginine or lysine); antimicrobials; antioxidants (such as ascorbic acid, sodium sulfite or sodium hydrogen-sulfite); buffers (such as borate, bicarbonate, Tris-HCl, citrates, phosphates, other organic acids); bulking agents (such as mannitol or glycine), chelating agents (such as ethylenediamine tetraacetic acid (EDTA)); complexing agents (such as caffeine, polyvinylpyrrolidone, beta-cyclodextrin or hydroxypropyl-beta-cyclodextrin); fillers; monosaccharides; disaccharides and other carbohydrates (such as glucose, mannose, or dextrins); proteins (such as serum albumin, gelatin or immunoglobulins); coloring; flavoring and diluting agents; emulsifying agents; hydrophilic polymers (such as polyvinylpyrrolidone); low molecular weight polypeptides; salt-forming counterions (such as sodium); preservatives (such as benzalkonium chloride, benzoic acid, salicylic acid, thimerosal, phenethyl alcohol, methylparaben, propylparaben, chlorhexidine, sorbic acid or hydrogen peroxide); solvents (such as glycerin, propylene glycol or polyethylene glycol); sugar alcohols (such as mannitol or sorbitol); suspending agents; surfactants or wetting agents (such as pluronics, PEG, sorbitan esters, polysorbates such as polysorbate 20, polysorbate 80, triton, tromethamine, lecithin, cholesterol, tyloxapal); stability enhancing agents (sucrose or sorbitol); tonicity enhancing agents (such as alkali metal halides (preferably sodium or potassium chloride, mannitol sorbitol); delivery vehicles; diluents; excipients and/or pharmaceutical adjuvants. Neutral buffered saline or saline mixed with conspecific serum albumin are examples of appropriate diluents. In accordance with appropriate industry standards, preservatives such as benzyl alcohol may also be added. The composition may be formulated as a lyophilizate using appropriate excipient solutions (e.g., sucrose) as diluents. Suitable components are nontoxic to recipients at the dosages and concentrations employed. Further examples of components that may be employed in pharmaceutical formulations are presented in Remington's Pharmaceutical Sciences, 16^{th} Ed. (1980) and 20^{th} Ed. (2000), Mack Publishing Company, Easton, PA.

[0235] Optionally, the composition additionally comprises one or more physiologically active agents, for example, an anti-angiogenic substance, a chemotherapeutic substance (such as capecitabine, 5-fluorouracil, or doxorubicin), an analgesic substance, etc., non-exclusive examples of which are provided herein. In various particular embodiments, the composition comprises one, two, three, four, five, or six physiologically active agents in addition to a CTLA-4-binding protein.

[0236] In another embodiment of the present disclosure, the compositions disclosed herein may be formulated in a neutral or salt form. Illustrative pharmaceutically-acceptable salts include the acid addition salts (formed with the free amino groups of the protein) and which are formed with inorganic acids such as, for example, hydrochloric or phosphoric acids, or such organic acids as acetic, oxalic, tartaric, mandelic, and the like. Salts formed with the free carboxyl groups can also be derived from inorganic bases such as, for example, sodium, potassium, ammonium, calcium, or ferric hydroxides, and such organic bases as isopropylamine, trimethylamine, histidine, procaine and the like. Upon formulation, solutions will be administered in a manner compatible with the dosage formulation and in such amount as is therapeutically effective.

[0237] The carriers can further comprise any and all solvents, dispersion media, vehicles, coatings, diluents, antibacterial and antifungal agents, isotonic and absorption delaying agents, buffers, carrier solutions, suspensions, colloids, and the like. The use of such media and agents for pharmaceutical active substances is well known in the art. Except insofar as any conventional media or agent is incompatible with the active ingredient, its use in the therapeutic compositions is contemplated. Supplementary active ingredients can also be incorporated into the compositions. The phrase “pharmaceutically-acceptable” refers to molecular entities and compositions that do not produce an allergic or similar untoward reaction when administered to a human.

[0238] The optimal pharmaceutical composition will be determined by one skilled in the art depending upon, for example, the intended route of administration, delivery format, and desired dosage. See for example, Remington's Pharmaceutical Sciences, supra. Such compositions may influence the physical state, stability, rate of in vivo release, and rate of in vivo clearance of the polypeptide. For example, suitable compositions may be water for injection, physiological saline solution for parenteral administration.

### 7.10.1. Content of Pharmaceutically Active Ingredient

[0239] In typical embodiments, the active ingredient (i.e., the proteins and polypeptides of the present disclosure) is present in the pharmaceutical composition at a concentration of at least 0.01 mg/ml, at least 0.1 mg/ml, at least 0.5 mg/ml, or at least 1 mg/ml. In certain embodiments, the active ingredient is present in the pharmaceutical composition at a concentration of at least 1 mg/ml, 2 mg/ml, 3 mg/ml, 4 mg/ml, 5 mg/ml, 10 mg/ml, 15 mg/ml, 20 mg/ml, or 25 mg/ml. In certain embodiments, the active ingredient is present in the pharmaceutical composition at a concentration of at least 30 mg/ml, 35 mg/ml, 40 mg/ml, 45 mg/ml or 50 mg/ml.

[0240] In some embodiments, the pharmaceutical composition comprises one or more additional active ingredients in addition to the proteins or polypeptides of the present disclosure. The one or more additional active ingredients can be a drug targeting a different check point receptor, such as PD-1 inhibitor (e.g., anti-PD-1 antibody) or TIGIT inhibitor (e.g., anti-TIGIT antibody).

### 7.10.2. Formulation Generally

[0241] The pharmaceutical composition can be in any form appropriate for human or veterinary medicine, including a liquid, an oil, an emulsion, a gel, a colloid, an aerosol or a solid.

[0242] The pharmaceutical composition can be formulated for administration by any route of administration appropriate for human or veterinary medicine, including enteral and parenteral routes of administration.

[0243] In various embodiments, the pharmaceutical composition is formulated for administration by inhalation. In certain of these embodiments, the pharmaceutical composition is formulated for administration by a vaporizer. In certain of these embodiments, the pharmaceutical composition is formulated for administration by a nebulizer. In certain of these embodiments, the pharmaceutical composition is formulated for administration by an aerosolizer.

[0244] In various embodiments, the pharmaceutical composition is formulated for oral administration, for buccal administration, or for sublingual administration.

[0245] In some embodiments, the pharmaceutical composition is formulated for intravenous, intramuscular, or subcutaneous administration.

[0246] In some embodiments, the pharmaceutical composition is formulated for intrathecal or intracerebroventricular administration.

[0247] In some embodiments, the pharmaceutical composition is formulated for topical administration.

### 7.10.3. Pharmacological Compositions Adapted for Injection

[0248] For intravenous, cutaneous or subcutaneous injection, or injection at the site of affliction, the active ingredient will be in the form of a parenterally acceptable aqueous solution which is pyrogen-free and has suitable pH, isotonicity and stability. Those of relevant skill in the art are well able to prepare suitable solutions using, for example, isotonic vehicles such as Sodium Chloride Injection, Ringer's Injection, Lactated Ringer's Injection. Preservatives, stabilisers, buffers, antioxidants and/or other additives can be included, as required.

[0249] In various embodiments, the unit dosage form is a vial, ampule, bottle, or pre-filled syringe. In some embodiments, the unit dosage form contains 0.01 mg, 0.1 mg, 0.5 mg, 1 mg, 2.5 mg, 5 mg, 10 mg, 12.5 mg, 25 mg, 50 mg, 75 mg, or 100 mg of the pharmaceutical composition. In some embodiments, the unit dosage form contains 125 mg, 150 mg, 175 mg, or 200 mg of the pharmaceutical composition. In some embodiments, the unit dosage form contains 250 mg of the pharmaceutical composition.

[0250] In typical embodiments, the pharmaceutical composition in the unit dosage form is in liquid form. In various embodiments, the unit dosage form contains between 0.1 mL and 50 ml of the pharmaceutical composition. In some embodiments, the unit dosage form contains 1 ml, 2.5 ml, 5 ml, 7.5 ml, 10 ml, 25 ml, or 50 ml of pharmaceutical composition.

[0251] In particular embodiments, the unit dosage form is a vial containing 1 ml of the pharmaceutical composition at a concentration of 0.01 mg/ml, 0.1 mg/ml, 0.5 mg/ml, or 1 mg/ml. In some embodiments, the unit dosage form is a vial containing 2 ml of the pharmaceutical composition at a concentration of 0.01 mg/ml, 0.1 mg/ml, 0.5 mg/ml, or 1 mg/ml.

[0252] In some embodiments, the pharmaceutical composition in the unit dosage form is in solid form, such as a lyophilate, suitable for solubilization.

[0253] Unit dosage form embodiments suitable for subcutaneous, intradermal, or intramuscular administration include preloaded syringes, auto-injectors, and autoinject pens, each containing a predetermined amount of the pharmaceutical composition described hereinabove.

[0254] In various embodiments, the unit dosage form is a preloaded syringe, comprising a syringe and a predetermined amount of the pharmaceutical composition. In certain preloaded syringe embodiments, the syringe is adapted for subcutaneous administration. In certain embodiments, the syringe is suitable for self-administration. In particular embodiments, the preloaded syringe is a single use syringe.

[0255] In various embodiments, the preloaded syringe contains about 0.1 mL to about 0.5 mL of the pharmaceutical composition. In certain embodiments, the syringe contains about 0.5 mL of the pharmaceutical composition. In specific embodiments, the syringe contains about 1.0 mL of the pharmaceutical composition. In particular embodiments, the syringe contains about 2.0 mL of the pharmaceutical composition.

[0256] In certain embodiments, the unit dosage form is an autoinject pen. The autoinject pen comprises an autoinject pen containing a pharmaceutical composition as described herein. In some embodiments, the autoinject pen delivers a predetermined volume of pharmaceutical composition. In other embodiments, the autoinject pen is configured to deliver a volume of pharmaceutical composition set by the user.

[0257] In various embodiments, the autoinject pen contains about 0.1 mL to about 5.0 mL of the pharmaceutical composition. In specific embodiments, the autoinject pen contains about 0.5 mL of the pharmaceutical composition. In particular embodiments, the autoinject pen contains about 1.0 mL of the pharmaceutical composition. In other embodiments, the autoinject pen contains about 5.0 mL of the pharmaceutical composition.

### 7.11. Unit Dosage Forms

[0258] The pharmaceutical compositions may conveniently be presented in unit dosage form.

[0259] The unit dosage form will typically be adapted to one or more specific routes of administration of the pharmaceutical composition.

[0260] In various embodiments, the unit dosage form is adapted for administration by inhalation. In certain of these embodiments, the unit dosage form is adapted for administration by a vaporizer. In certain of these embodiments, the unit dosage form is adapted for administration by a nebulizer. In certain of these embodiments, the unit dosage form is adapted for administration by an aerosolizer.

[0261] In various embodiments, the unit dosage form is adapted for oral administration, for buccal administration, or for sublingual administration.

[0262] In some embodiments, the unit dosage form is adapted for intravenous, intramuscular, or subcutaneous administration.

[0263] In some embodiments, the unit dosage form is adapted for intrathecal or intracerebroventricular administration.

[0264] In some embodiments, the pharmaceutical composition is formulated for topical administration.

[0265] The amount of active ingredient which can be combined with a carrier material to produce a single dosage form will generally be that amount of the compound which produces a therapeutic effect.

### 7.12. Methods of Use

[0266] Therapeutic antibodies may be used that specifically bind to intact CTLA-4.

[0267] In vivo and/or in vitro assays may optionally be employed to help identify optimal dosage ranges. The precise dose to be employed in the formulation will also depend on the route of administration, and the seriousness of the condition, and should be decided according to the judgment of the practitioner and each subject's circumstances. Effective doses may be extrapolated from dose-response curves derived from in vitro or animal model test systems.

[0268] An oligopeptide or polypeptide is within the scope of the present disclosure if it has an amino acid sequence that is at least 75%, 76%, 77%, 78%, 79%, 80%, 81%, 82%, 83%, 84%, 85%, 86%, 87%, 88%, 89%, 90%, 91%, 92%, 93%, 94%, 95%, 96%, 97%, 98% or 99% identical to least one of the CDRs provided herein; and/or to a CDR of a CTLA-4 binding agent that cross-blocks the binding of at least one of antibodies A1-A28 to CTLA-4, and/or is cross-blocked from binding to CTLA-4 by at least one of antibodies A1-A28; and/or to a CDR of a CTLA-4 binding agent wherein the binding agent can block the binding of CTLA-4 to its ligands.

[0269] CTLA-4 binding agent polypeptides and antibodies are within the scope of the present disclosure if they have amino acid sequences that are at least 85%, 86%, 87%, 88%, 89%, 90%, 91%, 92%, 93%, 94%, 95%, 96%, 97%, 98% or 99% identical to a variable region of at least one of antibodies A1-A28, and cross-block the binding of at least one of antibodies A1-A28 to CTLA-4, and/or are cross-blocked from binding to CTLA-4 by at least one of antibodies A1-A28; and/or can block the inhibitory effect of CTLA-4 on its ligands.

[0270] Antibodies according to the disclosure may have a binding affinity for human CTLA-4 of less than or equal to 5×10⁻⁷M, less than or equal to 1×10⁻⁷M, less than or equal to 0.5×10⁻⁷M, less than or equal to 1×10⁻⁸M, less than or equal to 1×10⁻⁹M, less than or equal to 1×10⁻¹⁰M, less than or equal to 1×10⁻¹¹M, or less than or equal to 1×10⁻¹²M.

[0271] The affinity of an antibody or binding partner, as well as the extent to which an antibody inhibits binding, can be determined by one of ordinary skill in the art using conventional techniques, for example those described by Scatchard et al. (Ann. N. Y. Acad. Sci. 51:660-672 (1949)) or by surface plasmon resonance (SPR; BIAcore, Biosensor, Piscataway, NJ). For surface plasmon resonance, target molecules are immobilized on a solid phase and exposed to ligands in a mobile phase running along a flow cell. If ligand binding to the immobilized target occurs, the local refractive index changes, leading to a change in SPR angle, which can be monitored in real time by detecting changes in the intensity of the reflected light. The rates of change of the SPR signal can be analyzed to yield apparent rate constants for the association and dissociation phases of the binding reaction. The ratio of these values gives the apparent equilibrium constant (affinity) (see, e.g., Wolff et al., Cancer Res. 53:2560-65 (1993)).

[0272] An antibody according to the present disclosure may belong to any immunoglobin class, for example IgG, IgE, IgM, IgD, or IgA. It may be obtained from or derived from an animal, for example, fowl (e.g., chicken) and mammals, which includes but is not limited to a mouse, rat, hamster, rabbit, or other rodent, cow, horse, sheep, goat, camel, human, or other primate. The antibody may be an internalizing antibody. Production of antibodies is disclosed generally in U.S. Patent Publication No. 2004/0146888 A1.

[0273] In the methods described above to generate antibodies according to the disclosure, including the manipulation of the specific A1-A28 CDRs into new frameworks and/or constant regions, appropriate assays are available to select the desired antibodies (i.e. assays for determining binding affinity to CTLA-4; cross-blocking assays; Biacore-based competition binding assay;” in vivo assays).

### 7.12.1. Methods of Treating a Disease Responsive to a CTLA-4 Inhibitor Or Activator

[0274] In another aspect, methods are presented for treating a subject having a disease responsive to a CTLA-4 inhibitor or activator. The disease can be cancer, autoimmune disease, or viral or bacterial infection.

[0275] The terms “treatment,” “treating,” and the like are used herein to generally mean obtaining a desired pharmacologic and/or physiologic effect. The effect may be prophylactic, in terms of completely or partially preventing a disease, condition, or symptoms thereof, and/or may be therapeutic in terms of a partial or complete cure for a disease or condition and/or adverse effect, such as a symptom, attributable to the disease or condition. “Treatment” as used herein covers any treatment of a disease or condition of a mammal, particularly a human, and includes: (a) preventing the disease or condition from occurring in a subject which may be predisposed to the disease or condition but has not yet been diagnosed as having it; (b) inhibiting the disease or condition (e.g., arresting its development); or (c) relieving the disease or condition (e.g., causing regression of the disease or condition, providing improvement in one or more symptoms). Improvements in any conditions can be readily assessed according to standard methods and techniques known in the art. The population of subjects treated by the method of the disease includes subjects suffering from the undesirable condition or disease, as well as subjects at risk for development of the condition or disease.

[0276] By the term “therapeutically effective dose” or “effective amount” is meant a dose or amount that produces the desired effect for which it is administered. The exact dose or amount will depend on the purpose of the treatment, and will be ascertainable by one skilled in the art using known techniques (see, e.g., Lloyd (1999) The Art, Science and Technology of Pharmaceutical Compounding).

[0277] The term “sufficient amount” means an amount sufficient to produce a desired effect.

[0278] The term “therapeutically effective amount” is an amount that is effective to ameliorate a symptom of a disease. A therapeutically effective amount can be a “prophylactically effective amount” as prophylaxis can be considered therapy.

[0279] The term “ameliorating” refers to any therapeutically beneficial result in the treatment of a disease state, e.g., a neurodegenerative disease state, including prophylaxis, lessening in the severity or progression, remission, or cure thereof.

[0280] The actual amount administered, and rate and time-course of administration, will depend on the nature and severity of protein aggregation disease being treated. Prescription of treatment, e.g. decisions on dosage etc., is within the responsibility of general practitioners and other medical doctors, and typically takes account of the disorder to be treated, the condition of the individual patient, the site of delivery, the method of administration and other factors known to practitioners. Examples of the techniques and protocols mentioned above can be found in Remington's Pharmaceutical Sciences, 16th edition, Osol, A. (ed), 1980.

[0281] In some embodiments, the pharmaceutical composition is administered by inhalation, orally, by buccal administration, by sublingual administration, by injection or by topical application.

[0282] In some embodiments, the pharmaceutical composition is administered in an amount sufficient to modulate survival of neurons or dopamine release. In some embodiments, the major cannabinoid is administered in an amount less than 1 g, less than 500 mg, less than 100 mg, less than 10 mg per dose.

[0283] In some embodiments, the pharmaceutical composition is administered once a day, 2-4 times a day, 2-4 times a week, once a week, or once every two weeks.

[0284] A composition can be administered alone or in combination with other treatments, either simultaneously or sequentially dependent upon the condition to be treated. For example, the pharmaceutical composition can be administered in combination with one or more drugs targeting a different check point receptor, such as PD-1 inhibitor (e.g., anti-PD-1 antibody) or TIGIT inhibitor (e.g., anti-TIGIT antibody).

### 8. EXAMPLES

[0285] Below are examples of specific embodiments for carrying out the present disclosure. The examples are offered for illustrative purposes only, and are not intended to limit the scope of the present disclosure in any way. Efforts have been made to ensure accuracy with respect to numbers used (e.g., amounts, temperatures, etc.), but some experimental error and deviation should, of course, be allowed for.

[0286] The practice of the present disclosure will employ, unless otherwise indicated, conventional methods of protein chemistry, biochemistry, recombinant DNA techniques and pharmacology, within the skill of the art. Such techniques are explained fully in the literature. See, e.g., T. E. Creighton, Proteins: Structures and Molecular Properties (W.H. Freeman and Company, 1993); A. L. Lehninger, Biochemistry (Worth Publishers, Inc., current addition); Sambrook, et al., Molecular Cloning: A Laboratory Manual (2nd Edition, 1989); Methods In Enzymology (S. Colowick and N. Kaplan eds., Academic Press, Inc.); Remington's Pharmaceutical Sciences, 18th Edition (Easton, Pennsylvania: Mack Publishing Company, 1990); Carey and Sundberg Advanced Organic Chemistry 3^{rd} Ed. (Plenum Press) Vols A and B(1992). Furthermore, methods of generating and selecting antibodies explained in Adler et al., A natively paired antibody library yields drug leads with higher sensitivity and specificity than a randomly paired antibody library, MAbs (2018), and Adler et al., Rare, high-affinity mouse anti-CTLA-4 antibodies that function in checkpoint blockade, discovered using microfluidics and molecular genomics, MAbs (2017), which are incorporated by reference in its entirety herein, can be employed.

### 8.1. Example 1: Generation of Antigen Binding Protein

### Mouse Immunization and Sample Preparation:

[0287] First, transgenic mice carrying inserted human immunoglobulin genes were immunized with soluble CTLA-4 immunogen of SEQ ID NO: 7001 (i.e., His-tagged CTLA-4 protein (R&D Systems)) using TiterMax as an adjuvant. One μg of immunogen was injected into each hock and 3 μg of immunogen was administered intraperitoneally, every third day for 15 days. Titer was assessed by enzyme-linked immunosorbent assay (ELISA) on a 1:2 dilution series of each animal's serum, starting at a 1:200 dilution. A final intravenous boost of 2.5 μg/hock without adjuvant was given to each animal before harvest. Lymph nodes (popliteal, inguinal, axillary, and mesenteric) were surgically removed after sacrifice. Single cell suspensions for each animal were made by manual disruption followed by passage through a 70 μm filter. Next, the EasySep™ Mouse Pan-B Cell Isolation Kit (Stemcell Technologies) negative selection kit was used to isolate B cells from each sample. The lymph node B cell populations were quantified by counting on a C-Chip hemocytometer (Incyto) and assessed for viability using Trypan blue. The cells were then diluted to 5,000-6,000 cells/mL in phosphate-buffered saline (PBS) with 12% OptiPrep™ Density Gradient Medium (Sigma). This cell mixture was used for microfluidic encapsulation. Approximately one million B cells were run from each of the six animals through an emulsion droplet microfluidics platform.

### Generating Paired Heavy and Light Chain Libraries:

[0288] A DNA library encoding scFv from RNA of single cells, with native heavy-light Ig pairing intact, was generated using the emulsion droplet microfluidics platform or vortex emulsions. The method for generating the DNA library was divided into 1) poly(A)+mRNA capture, 2) multiplexed overlap extension reverse transcriptase polymerase chain reaction (OE-RT-PCR), and 3) nested PCR to remove artifacts and add adapters for deep sequencing or yeast display libraries. The scFv libraries were generated from approximately one million B cells from each animal that achieved a positive ELISA titer.

[0289] For poly(A)+mRNA capture, a custom designed co-flow emulsion droplet microfluidic chip fabricated from glass (Dolomite) was used. The microfluidic chip has two input channels for fluorocarbon oil (Dolomite), one input channel for the cell suspension mix described above, and one input channel for oligo-dT beads (NEB) at 1.25 mg/ml in cell lysis buffer (20 mM Tris pH 7.5, 0.5 M NaCl, 1 mM ethylenediaminetetraacetic acid (EDTA), 0.5% Tween-20, and 20 mM dithiothreitol). The input channels were etched to 50 μm by 150 μm for most of the chip's length, narrow to 55 μm at the droplet junction, and were coated with hydrophobic Pico-Glide (Dolomite). Three Mitos P-Pump pressure pumps (Dolomite) were used to pump the liquids through the chip. Droplet size depends on pressure, but typically droplets of ˜45 mm diameter are optimally stable. Emulsions were collected into chilled 2 ml microcentrifuge tubes and incubated at 40° C. for 15 minutes for mRNA capture. The beads were extracted from the droplets using Pico-Break (Dolomite). In some embodiments, similar single cell partitioning emulsions were made using a vortex.

[0290] For multiplex OE-RT-PCR, glass Telos droplet emulsion microfluidic chips were used (Dolomite). mRNA-bound beads were re-suspended into OE-RT-PCR mix and injected into the microfluidic chips with a mineral oil-based surfactant mix (available commercially from GigaGen) at pressures that generate 27 μm droplets. The OE-RT-PCR mix contains 2× one-step RT-PCR buffer, 2.0 mM MgSO₄, SuperScript III reverse transcriptase, and Platinum Taq (Thermo Fisher Scientific), plus a mixture of primers directed against the IgK C region, the IgG C region, and all V regions (FIG. 2). The overlap region was a DNA sequence that encodes a Gly-Ser rich scFv linker sequence. The DNA fragments were recovered from the droplets using a droplet breaking solution (available commercially from GigaGen) and then purified using QIAquick PCR Purification Kit (Qiagen). In some embodiments, similar OE-RT-PCR emulsions were made using a vortex.

[0291] For nested PCR (FIG. 2), the purified OE-RT-PCR product was first run on a 1.7% agarose gel for 80 minutes at 150 V. A band at 1200-1500 base pair (bp) corresponding to the linked product was excised and purified using NucleoSpin Gel and PCR Clean-up Kit (Macherey Nagel). PCR was then performed to add adapters for Illumina sequencing or yeast display; for sequencing, a randomer of seven nucleotides is added to increase base calling accuracy in subsequent next generation sequencing steps. Nested PCR was performed with 2×NEBNext High-Fidelity amplification mix (NEB) with either Illumina adapter containing primers or primers for cloning into the yeast expression vector. The nested PCR product was run on a 1.2% agarose gel for 50 minutes at 150V. A band at 800-1100 bp was excised and purified using NucleoSpin Gel and PCR Clean-up Kit (Macherey Nagel).

[0292] In some embodiments, scFv libraries were not natively paired, for example, randomly paired by amplifying scFv directly from RNA isolated from B cells.

### 8.2. Example 2: Isolation of CTLA-4 Binders by Yeast Display

### Library Screening:

[0293] Human IgG1-Fc (Thermo Fisher Scientific) and CTLA-4 (R&D Systems) proteins were biotinylated using the EZ-Link Micro Sulfo-NHS-LC-Biotinylation kit (Thermo Fisher Scientific). The biotinylation reagent was resuspended to 9 mM and added to the protein at a 50-fold molar excess. The reaction was incubated on ice for 2 hours and then the biotinylation reagent was removed using Zeba desalting columns (Thermo Fisher Scientific). The final protein concentration was calculated with a Bradford assay.

[0294] Next, the six DNA libraries were expressed as surface scFv in yeast. A yeast surface display vector (pYD) that contains a GAL1/10 promoter, an Aga2 cell wall tether, and a C-terminal c-Myc tag was built. The GAL1/10 promoter induces expression of the scFv protein in medium that contains galactose. The Aga2 cell wall tether was required to shuttle the scFv to the yeast cell surface and tether the scFv to the extracellular space. The c-Myc tag was used during the flow sort to stain for yeast cells that express in-frame scFv protein. Saccharomyces cerevisiae cells (ATCC) were electroporated (Bio-Rad Gene Pulser II; 0.54 kV, 25 uF, resistance set to infinity) with gel-purified nested PCR product and linearized pYD vector for homologous recombination in vivo. Transformed cells were expanded and induced with galactose to generate yeast scFv display libraries.

[0295] Two million yeast cells from the expanded scFv libraries were stained with anti-c-Myc (Thermo Fisher Scientific A21281) and an AF488-conjugated secondary antibody (Thermo Fisher Scientific A11039). To select scFv-expressing cells that bind to CTLA-4, biotinylated CTLA-4 antigen was added to the yeast culture (7 nM final) during primary antibody incubation and then stained with PE-streptavidin (Thermo Fisher Scientific). Yeast cells were flow sorted on a BD Influx (Stanford Shared FACS Facility) for double-positive cells (AF488C/PEC), and recovered clones were then plated on SD-CAA plates with kanamycin, streptomycin, and penicillin (Teknova) for expansion. The expanded first round FACS clones were then subjected to a second round of FACS with the same antigen at the same molarity (7 nM final). Plasmid minipreps (Zymo Research) were prepared from yeast recovered from the final FACS sort. Tailed-end PCR was used to add Illumina adapters to the plasmid libraries for deep sequencing.

[0296] In a typical FACS dot plot, the upper right quadrant contains yeast that stain for both antigen binding and scFv expression (identified by a C-terminal c-Myc tag). The lower left quadrant contains yeast that do not stain for either the antigen or scFv expression. The lower right quadrant contains yeast that express the scFv but do not bind the antigen. The frequency of binders in each repertoire was estimated by dividing the count of yeast that double stain for antigen and scFv expression by the count of yeast that express an scFv. Libraries generated from immunized mice yielded low percentages of scFv binders (ranging from 0.08%-1.28%) when sorted at 7 nM final antigen concentration. There was no clear association between serum titer and the frequency of binders in a repertoire. Following expansion of these sorted cells, a second round of FACS at 7 nM final antigen concentration was used to increase the specificity of the screen. The frequency of binders in the second FACS was always substantially higher than the first FACS, ranging from 8.39%-84.4%. Generally, lower frequency of binders in the first sort yielded lower frequency of binders in the second sort. Presumably, this is due to lower gating specificity for samples that have fewer bona fide binders in the original repertoire.

### Deep Repertoire Sequencing:

[0297] CTLA-4-binding clones were recovered as a library (“a library of CTLA-4 binding clones”), and subjected to deep repertoire sequencing. Deep repertoire sequencing determines the sequences of all paired variable (V(D)J) regions of both heavy and light chain sequences. The library of CTLA-4 binding clones were deposited under ATCC Accession No. PTA-125512 under the Budapest Treaty on Nov. 20, 2018, under ATCC Account No. 197361 (American Type Culture Collection (ATCC), 10801 University Boulevard, Manassas, VA 20110 USA). Each clone in the library contains an scFv comprising a paired variable (V(D)J) regions of both heavy and light chain sequences originating from a single cell. Deep repertoire sequencing determines the sequences of all paired variable (V(D)J) regions of both heavy and light chain sequences. Some of the heavy and light chain sequences obtained from sequencing the yeast scFv library are provided in SEQ ID NOS: 1-28 and SEQ ID NOS: 101-128. Additional sequences obtained from sequencing the yeast scFv library are provided in SEQ ID NOS 8000-8991. Specifically, their variable light chain (V_{L}) sequences include SEQ ID NOS: 8000-8495. Their heavy chain (V_{H}) sequences include SEQ ID NOS: 8496-8991.

[0298] Deep antibody sequencing libraries were quantified using a quantitative PCR Illumina Library Quantification Kit (KAPA) and diluted to 17.5 pM. Libraries were sequenced on a MiSeq (Illumina) using a 500 cycle MiSeq Reagent Kit v2, according to the manufacturer's instructions. To obtain high quality sequence reads with maintained heavy and light chain linkage, sequencing was performed in two separate runs. In the first run (“linked run”), the scFv libraries were directly sequenced to obtain forward read of 340 cycles for the light chain V-gene and CDR3, and reverse read of 162 cycles that cover the heavy chain CDR3 and part of the heavy chain V-gene. In the second run (“unlinked run”), the scFv library was first used as a template for PCR to separately amplify heavy and light chain V-genes. Then, forward reads of 340 cycles and reverse reads of 162 cycles for the heavy and light chain Ig were obtained separately. This produces forward and reverse reads that overlap at the CDR3 and part of the V-gene, which increases confidence in nucleotide calls.

[0299] To remove base call errors, the expected number of errors (E) for a read were calculated from its Phred scores. By default, reads with E>1 were discarded, leaving reads for which the most probable number of base call errors is zero. As an additional quality filter, singleton nucleotide reads were discarded because sequences found two or more times have a high probability of being correct. Finally, high-quality, linked antibody sequences by merging filtered sequences were generated from the linked and unlinked runs. Briefly, a series of scripts that first merged forward and reverse reads from the unlinked run were written in Python. Any pairs of forward and reverse sequences that contained mismatches were discarded. Next, the nucleotide sequences from the linked run were used to query merged sequences in the unlinked run. The final output from the scripts is a series of full-length, high-quality variable (V(D)J) sequences, with native heavy and light chain Ig pairing.

[0300] To identify reading frame and FR/CDR junctions, a database of well-curated immunoglobulin sequences were first processed to generate position-specific sequence matrices (PSSMs) for each FR/CDR junction. These PSSMs were used to identify FR/CDR junctions for each of the merged nucleotide sequences generated using the processes described above. This identified the protein reading frame for each of the nucleotide sequences. CDR sequences that have a low identify score to the PSSMs are indicated by an exclamation point. Python scripts were then used to translate the sequences. Reads were required to have a valid predicted CDR3 sequence, so, for example, reads with a frame-shift between the V and J segments were discarded. Next, UBLAST was run using the scFv nucleotide sequences as queries and V and J gene sequences from the IMGT database as the reference sequences. The UBLAST alignment with the lowest E-value was used to assign V and J gene families and compute % ID to germline.

[0301] Each animal yielded 38-50 unique scFv sequences present at 0.1% frequency or greater after the second FACS selection, including a total of 28 unique scFv candidate binders (SEQ ID Nos: 1-28 for light chains; SEQ ID Nos: 101-128 for heavy chains). The light chain having a sequence of SEQ ID NO: [n] and the heavy chain having a sequence of SEQ ID NO: [100+n] are a cognate pair from a single cell, and forming a single scFv. For example, the light chain of SEQ ID NO:1 and the heavy chain of SEQ ID NO:101 are a cognate pair, the light chain of SEQ ID NO:28 and the heavy chain of SEQ ID NO:128 are a cognate pair, etc.

[0302] In this method, the two rounds of FACS resulted in enrichment of the CTLA-4-binding scFvs. In addition, many scFv were not detected in the sequencing data from the initial population of B cells from the immunized mice and most of the scFv present in the pre-sort mouse repertoires were eliminated following FACS. Therefore, this work suggests that most of the antibodies present in the repertoires of immunized mice are not strong binders to the immunogen and that this method can enrich for rare nM-affinity binders from the initial population of B cells from immunized mice.

### 8.3. Example 3: Biological Characteristics of Antigen Binding Protein

[0303] scFv sequences that were present at low frequency in pre-sort libraries and became high frequency in post-sort libraries were then synthesized as full-length mAbs in Chinese hamster ovary (CHO) cells. These mAbs comprise the 2-3 most abundant sequences in the second round of FACS for each animal.

### CTLA-4 Target Binding Profiles

[0304] The binding specificity and affinity of each full-length antibody towards CTLA-4 were determined using biolayer interferometry (BLI) and/or surface plasmon resonance (SPR). Anti-cyno CTLA-4 and anti-mouse CTLA-4 affinities were tested using ForteBio (BLI). Anti-human CTLA-4 affinities were measured using Carterra (SPR).

[0305] For BLI, antibodies were loaded onto an Anti-Human IgG Fc (AHC) biosensor using the Octet Red96 system (ForteBio). Loaded biosensors were dipped into antigen dilutions beginning at 300 nM, with 6 serial dilutions at 1:3. Kinetic analysis was performed using a 1:1 binding model and global fitting.

[0306] For SPR, we amine-coupled a moderate density (1,000 Response Units) of an antihuman IgG-Fc reagent (Southern Biotech 2047-01) to a Xantec CMD-50M chip (50 nm carboxymethyldextran medium density of functional groups) activated with 133 mM EDC (Sigma) and 33.3 mM S-NHS (ThermoFisher) in 100 mM MES pH 5.5. Then, goat anti-Human IgG Fc (Southern Biotech 2047-01) was coupled for 10 minutes at 25 mg/m L in 10 mM Sodim Acetate pH 4.5 (Carterra Inc.). The surface was then deactivated with 1 M ethanolamine pH 8.5 (Carterra Inc.). Running buffer used for the lawn immobilization was HBS-EPC (10 mM HEPES, 150 mM NaCl, 3 mM EDTA, 0.05% Tween 20, pH 7.4; Teknova).

[0307] The sensor chip was then transferred to a continuous flow microspotter (CFM; Carterra Inc.) for array capturing. The mAb supernatants were diluted 50-fold (3-10 mg/mL final concentration) into HBS-EPC with 1 mg/mL BSA. The samples were each captured twice with 15-minute and 4-minute capture steps on the first and second prints, respectively, to create multiple densities, using a 65 mL/min flow rate. The running buffer in the CFM was also HBS-EPC.

[0308] Next, the sensor chip was loaded onto an SPR reader (MX-96 system; Ibis Technologies) for the kinetic analysis. CTLA-4 was injected at five increasing concentrations in a four-fold dilution series with concentrations of 1.95, 7.8, 31.25, 125, and 500 nM in running buffer (HBS-EPC with 1.0 mg/mL BSA). CTLA-4 injections were 5 minutes with a 15-minute dissociation at 8 mL/second in a non-regenerative kinetic series. An injection of the goat anti-Human IgG Fc capture antibody at 75 mg/mL was injected at the end of the series to verify the capture level of each mAb. Binding data was double referenced by subtracting an interspot surface and a blank injection and analyzed for ka (on-rate), kd (off-rate), and KD (affinity) using the Kinetic Interaction Tool software (Carterra Inc.).

[0309] For cell surface binding studies, stable CTLA-4 expressing Flp-In CHO (Thermo Fisher Scientific) cells were generated and mixed at a 50:50 ratio. One million cells were stained with 1 μg of the disclosed anti-CTLA-4 recombinant antibodies in 200 μl of MACS Buffer (DPBS with 0.5% bovine serum albumin and 2 mM EDTA) for 30 minutes at 4° C. Cells were then co-stained with anti-human irrelevant target APC and anti-human IgG Fc-PE [M1310G05](BioLegend 41070) antibodies for 30 minutes at 4° C. An anti-human CTLA-4-FITC antibody was used as a control for these mixing experiments and cell viability was assessed with DAPI. Flow cytometry analysis was conducted on a BD Influx at the Stanford Shared FACS Facility and data was analyzed using FlowJo.

[0310] We identified antibodies that specifically bind to CTLA-4. Affinity to CTLA-4 (K_{D}) of each antibody is provided in TABLE 6. The Promega assay % inhibition was calculated relative to the strongest inhibitor, which is antibody A5. The affinity of each antibody against human CTLA-4, the on rate, off rate, and K_{D} are shown in TABLE 7.

TABLE 6

| | | | | Affinity to | | Affinity to |
|---|---|---|---|---|---|---|
| | | Promega assay | Promega | Human | Affinity to Cyno | Mouse |
| | Binds by | antagonist | assay % | CTLA-4 | CTLA4 | CTLA-4 |
| Ab# | FACS? | (EC50, ug/mL) | inhibition | (nM) | (nM) | (nM) |
| Ipilimumab | Yes | 0.51 | 50.2% | 4.9 | 1.3 | no binding |
| A1 | Yes | 0.13 | 43.2% | 0.77 | 0.96 | 51 |
| A2 | Yes | 0.12 | 75.4% | 5.1 | 3.1 | no binding |
| A3 | Yes | 0.18 | 49.8% | 1.5 | 1.2 | no binding |
| A4 | Yes | 0.15 | 81% | 3 | 1.2 | no binding |
| A5 | Yes | 0.18 | 100% | 4.6 | 2.2 | 39.4 |
| A6 | Yes | 0.18 | 61.7% | 5.7 | 1.6 | 87.8 |
| A7 | Yes | 0.17 | 11.5% | 5.7 | 0.75 | no binding |
| A8 | Yes | 0.15 | 54.7% | 4.6 | 1 | no binding |
| A9 | Yes | 0.19 | 60.8% | 6.8 | 0.92 | no binding |
| A10 | Yes | 0.26 | 24.5% | 22 | 3.1 | no binding |
| A11 | Yes | 0.42 | 26.6% | 7.5 | 1.6 | no binding |
| A12 | Yes | no blocking | 0% | 5.3 | 4.5 | not tested |
| A13 | Yes | 0.09 | 13.3% | 3.2 | 9.6 | not tested |
| A14 | Yes | 0.09 | 6% | 9.8 | 23.6 | not tested |
| A15 | Yes | no blocking | 0% | 10 | 2.6 | not tested |
| A16 | Yes | no blocking | 0% | 23 | 2.8 | not tested |
| A17 | Yes | no blocking | 0% | 51 | 6.3 | not tested |
| A18 | Yes | 0.89 | 8.6% | 48 | no binding | not tested |
| A19 | No | not tested | not tested | 3.3 | not tested | not tested |
| A20 | No | not tested | not tested | 20 | not tested | not tested |
| A21 | No | not tested | not tested | 31 | not tested | not tested |
| A22 | No | not tested | not tested | 32 | not tested | not tested |
| A23 | No | no blocking | 0% | 35 | not tested | not tested |
| A24 | No | not tested | not tested | 55 | not tested | not tested |
| A25 | No | not tested | not tested | 58 | not tested | not tested |
| A26 | No | not tested | not tested | 74 | not tested | not tested |
| A27 | No | not tested | not tested | 120 | not tested | not tested |
| A28 | No | no blocking | 0% | 46 | not tested | not tested |

TABLE 7

| | kon | | |
|---|---|---|---|
| | (M − 1 | koff | KD |
| | s − 1) | (s − 1) | (M) |
| Ipilimumab | 6.50E+04 | 3.20E−04 | 4.90E−09 |
| A1 | 2.10E+05 | 1.60E−04 | 7.70E−10 |
| A2 | 1.00E+05 | 5.20E−04 | 5.10E−09 |
| A3 | 1.90E+05 | 2.80E−04 | 1.50E−09 |
| A4 | 7.60E+04 | 2.30E−04 | 3.00E−09 |
| A5 | 9.00E+04 | 4.20E−04 | 4.60E−09 |
| A6 | 6.10E+04 | 3.50E−04 | 5.70E−09 |
| A7 | 6.40E+04 | 3.60E−04 | 5.70E−09 |
| A8 | 8.50E+04 | 3.90E−04 | 4.60E−09 |
| A9 | 6.30E+04 | 4.30E−04 | 6.80E−09 |
| A10 | 2.30E+04 | 5.10E−04 | 2.20E−08 |
| A11 | 4.70E+04 | 3.50E−04 | 7.50E−09 |
| A12 | 5.10E+04 | 2.70E−04 | 5.30E−09 |
| A13 | 1.30E+05 | 4.20E−04 | 3.20E−09 |
| A14 | 5.40E+04 | 5.20E−04 | 9.80E−09 |
| A15 | 7.00E+04 | 7.30E−04 | 1.00E−08 |
| A16 | 3.10E+04 | 7.20E−04 | 2.30E−08 |
| A17 | 6.60E+04 | 3.40E−03 | 5.10E−08 |
| A18 | 4.20E+03 | 2.00E−04 | 4.80E−08 |
| A19 | 1.20E+05 | 3.80E−04 | 3.30E−09 |
| A20 | 3.20E+04 | 6.40E−04 | 2.00E−08 |
| A21 | 1.80E+04 | 5.50E−04 | 3.10E−08 |
| A22 | 1.10E+04 | 3.60E−04 | 3.20E−08 |
| A23 | 3.40E+04 | 1.20E−03 | 3.50E−08 |
| A24 | 2.50E+04 | 1.40E−03 | 5.50E−08 |
| A25 | 3.00E+04 | 1.80E−03 | 5.80E−08 |
| A26 | 3.50E+03 | 2.60E−04 | 7.40E−08 |
| A27 | 3.10E+04 | 3.60E−03 | 1.20E−07 |
| A28 | 5.20E+04 | 2.40E−03 | 4.60E−08 |

### CTLA-4 Ligand Blocking Assay:

[0311] For analysis of the antibodies' ability to block the CTLA-4/ligand interaction, the CTLA-4 Blockade Bioassay (Promega) was used according to the manufacturer's instructions. On the day prior to the assay, aAPC/Raji cells that express CTLA-4 ligands CD80 and CD86 were thawed into 90% Ham's F-12/10% fetal bovine serum (FBS) and plated into the inner 60 wells of two 96-well plates. The cells were incubated overnight at 37° C., 5% CO₂. On the day of assay, antibodies were diluted in 99% RPMI/1% FBS. The antibody dilutions were added to the wells containing the CTLA-4 ligand expressing aAPC/Raji cells, followed by addition of CTLA-4 effector cells (thawed into 99% RPMI/1% FBS). The cell/antibody mixtures were incubated at 37° C., 5% CO₂ for 6 hours, after which Bio-Glo Reagent was added and luminescence was read using a Spectramax i3× plate reader (Molecular Devices). Fold-induction was plotted by calculating the ratio of [signal with antibody]/[signal with no antibody], and the plots were used to calculate the EC50 using SoftMax Pro (Molecular Devices). In-house produced ipilimumab was used as a positive control, and an antibody binding to an irrelevant antigen was used as a negative control.

[0312] Binding of CTLA-4 to its ligand leads to inhibition of T cell signaling. Antibodies that bind CTLA-4 and antagonize CTLA-4/ligand interactions can therefore remove this inhibition, allowing T cells to be activated. CTLA-4/ligand checkpoint blockade was tested through an in vitro cellular Nuclear Factor of Activated T cells (NFAT) luciferase reporter assay. In this assay, antibodies whose anti-CTLA-4 epitopes fall inside the ligand binding domain antagonize CTLA-4/ligand interactions, resulting in an increase of the NFAT-luciferase reporter. The full-length mAb candidates that can bind CTLA-4 expressed in CHO cells were assayed. To generate an EC50 value for each mAb, measurements were made across several concentrations. It was found that some full-length mAbs are functional in checkpoint blockade in a dose dependent manner as summarized in TABLE 6.

[0313] The ability of the CTLA4 antibodies (indicated in TABLE 8) to prevent the binding of CD80 or CD86 to plate-bound CTLA4 was evaluated using ELISA. The EC50 and the percent inhibition of each interaction is shown in the TABLE 8. Plates were coated with rhCTLA4-Fc and then blocked with 1×PBST with 5% w/v nonfat dry milk. After blocking a dilution series of the indicated antibody was added to the plate. Then, to determine how much CD80 or CD86 was still able to bind plate bound CTLA4, after the plates were washed, rhCD80-His or rhCD86-His, respectively, was added to the plate. Unbound CD80-His/CD86-His was washed away and mouse anti-His-HRP was added. TMB was used to determine how much CD80-His/CD86-His bound to the plate bound CTLA4 in the presence of each antibody.

[0314] In some embodiments of the present disclosure, the anti-CTLA-4 antibodies function pharmacologically by antibody-dependent cell-mediated cytotoxicity (ADCC). In some embodiments of the present disclosure, immune-related toxicities related to anti-CTLA-4 antibody therapy are abrogated with an antibody that functions in ADCC but which does not function in checkpoint blockade.

TABLE 8

| | | | CD86 | |
|---|---|---|---|---|
| | CD80 | | EC50 | |
| | EC50 | CD80 % | (ug/ | CD86 % |
| Antibody | (ug/mL) | inhibition | ml) | inhibition |
| Ipilimumab | 0.08211 | 96.5% | 0.1136 | 90.6% |
| CTLA4.A7 | 0.9955 | 92.1% | 1.98 | 78.8% |
| CTLA4.A2 | 0.1006 | 95.4% | 0.1452 | 91.5% |
| CTLA4.A12 | 0.2427 | 89.2% | 0.3704 | 77.4% |
| CTLA4.A14 | 0.2262 | 83.7% | 0.2442 | 54.5% |
| CTLA4.A5 | 0.07049 | 96.3% | 0.1218 | 90.6% |

### Epitope Binning:

[0315] Epitope binning was performed using high-throughput Array SPR in a modified classical sandwich approach. A sensor chip was functionalized using the Carterra CFM and methods similar to the SPR affinity studies, except a CMD-200M chip type was used (200 nm carboxymethyl dextran, Xantec) and mAbs were coupled at 50 mg/mL to create a surface with higher binding capacity (˜3,000 reactive units immobilized). The mAb supernatants were diluted at 1:1 or 1:10 in running buffer, depending on the concentration of the mAb in the supernatant.

[0316] The sensor chip was placed in the MX-96 instrument, and the captured mAbs (“ligands”) were crosslinked to the surface using the bivalent amine reactive linker bis(sulfosuccinimidyl) suberate (BS3, ThermoFisher), which was injected for 10 minutes at 0.87 mM in water. Excess activated BS3 was neutralized with 1 M ethanolamine pH 8.5. For each binning cycle, a 7-minute injection of 250 mg/mL human IgG (Jackson ImmunoResearch 009-000-003) was used to block reference surfaces and any remaining capacity of the target spots.

[0317] Next, 250 nM CTLA-4 protein was injected onto the sensor chip, followed by injections of the diluted mAb supernatants (“analytes”) or buffer blanks as negative controls. Thus, the analyte mAb only bound to the antigen if it was not competitive with the ligand mAb. At the end of each cycle, a one minute regeneration injection was performed using a solution of 4 parts Pierce IgG Elution Buffer (ThermoFisher #21004), one part 5 M NaCl (0.83 M final), and 1.25 parts 0.85% H3PO4 (0.17% final).

[0318] A network community plot algorithm was then used in an SPR epitope data analysis software package (Carterra Inc.) to determine epitope bins. Note that the clustering algorithm groups mAbs for which only analyte data are available separately from the mAbs for which both ligand and analyte data are available. This phenomenon is an artifact of the incomplete competitive matrix. mAbs with both ligand and analyte data had more mAb-mAb measurements, resulting in more mAb-mAb connections, which led to a closer relationship in the community plot.

[0319] The epitope binning showed that all the mAbs were in distinct bins from ipilimumab (FIG. 3).

### 8.4. Example 4: Influence of CTLA-4 ABPs on Tumor Growth

[0320] Transgenic mice expressing human CTLA-4 (hCTLA-4 KI mice) were implanted subcutaneously with MC38 tumor cells on the right flank. The hCTLA-4 KI mice were treated with one mg/kg of the indicated CTLA-4 antibody on Days 8, 11, and 14 post-implantation. Specifically, the mice were treated with a control antibody (n=8), ipilumumab (n=8), CTLA4.A2 antibody (n=8), CTLA4.A14 antibody (n=9), CTLA4.A14.2a antibody (n=8), CTLA4.A7 antibody (n=9), CTLA4.A7 antibody (n=9), and CTLA4.A12 antibody (n=8). CTLA-4.A14.2a antibody is the A14 antibody cloned onto a mouse IgG2a background, which enhances antibody-dependent cellular cytotoxicity (ADCC) activity. Tumor volume was measured and tumor growth inhibition was calculated using the formula below:

$$Mean \% Inhibition = ( mean ( C ) - mean ( T ) ) / mean ( C ) * 100 \%$$

[0321] T—current group value
[0322] C—control group value

[0323] Tumors were implanted subcutaneously in the right flank region with MC38 tumor cells (1×10⁶) in 0.1 ml of PBS for tumor development. The cells in exponential growth phase were harvested and quantitated by cell counter before tumor implantation. Tumor volumes were measured twice per week in two dimensions using a caliper, and the volume will be expressed in mm³ using the formula: “V=(L×W×W)/2, where V is tumor volume, L is tumor length (the longest tumor dimension) and W is tumor width (the longest tumor dimension perpendicular to L). Dosing as well as tumor and body weight measurements were conducted in a Laminar Flow Cabinet. The body weights and tumor volumes were measured by using StudyDirector™ software (version 3.1.399.19). Animals were dosed i.p. (intraperitoneally) with the indicated protein in a sterile saline solution including 0.1 mg/ml of the indicated protein. Each mouse received 10 microliters of the indicated solution per a gram of body weight, which leads to a dosing of 1 mg/kg. Animals were dosed days 0, 3, and 6 post randomization.

[0324] TABLE 9 shows the percentage of mice in which the tumor had a complete response (CR) to the treatment. At least 2 consecutive tumor measurements of 0 mm³ following treatment initiation qualifies as a CR.

TABLE 9

| Antibody | % of tumors with CR |
|---|---|
| Control | 12.5% (1 of 8) |
| Ipilimumab | 75% (6 of 8) |
| CTLA4.A2 | 100% (8 of 8) |
| CTLA4.A14 | 66.67% (6 of 9) |
| CTLA4.A14.2a | 75% (6 of 8) |
| CTLA4.A7 | 55.6% (5 of 9) |
| CTLA4.A12 | 50% (4 of 8) |

[0325] TABLE 10 shows the percentage of mice with tumors that had a CR but then later relapsed by day 56. The group treated with CTLA4.A14.2a that had previously shown a CR had 0% relapse by day 56, indicating that ADCC can prolong the anti-tumor immunity.

TABLE 10

| | % of relapse by Day 56 |
|---|---|
| | in tumors that had |
| Antibody | previously shown CR |
| Ipilimumab | 16.67% (1 of 6) |
| CTLA4.A2 | 25% (2 of 8) |
| CTLA4.A14 | 33.3% (2 of 6) |
| CTLA4.A14.2a | 0% (0 of 6) |

[0326] TABLE 11 shows the mean inhibition of tumor volume over time when the hCTLA-4 KI mice implanted with MC38 tumor cells were treated with one mg/kg of the control or one mg/kg of the indicated CTLA-4 antibodies.

TABLE 11
Mean Inhibition

| Study day | 8 | 11 | 14 | 17 | 21 | 24 | 27 | 29 | 31 | 35 | 38 |
|---|---|---|---|---|---|---|---|---|---|---|---|
| Control | n/a | n/a | n/a | n/a | n/a | n/a | n/a | n/a | n/a | n/a | n/a |
| Ipilimumab | −3.81% | 0.44% | 31.41% | 69.65% | 84.04% | 90.73% | 96.00% | 96.92% | 96.61% | 87.45% | 88.27% |
| CTLA4.A7 | −7.49% | 10.91% | 34 54% | 60.11% | 70.73% | 81.04% | 78.25% | 78.75% | 70.60% | 50.50% | 43.41% |
| CTLA4.A2 | −6.79% | −6.10% | 26.70% | 61.14% | 85.22% | 97.98% | 99.58% | 100.00% | 100.00% | 99.55% | 99.36% |
| CTLA4.A12 | −5.89% | 12.35% | 34.21% | 49.59% | 70.56% | 86.82% | 90.22% | 91.82% | 91.13% | 68.63% | 70.44% |
| CTLA4.A14 | −7.37% | −6.91% | 26.70% | 58.54% | 80.64% | 93.71% | 95.73% | 97.23% | 97.26% | 92.22% | 90.17% |
| CTLA4.A14.2a | −4.74% | −20.04% | 9.74% | 40.80% | 65.98% | 87.85% | 93.48% | 95.01% | 93.66% | 81.40% | 82.75% |

### 8.5. Example 5: Influence of CTLA4 ABPs on Systemic Anti-Tumor Immunity

[0327] The hCTLA4 KI mice bearing MC38 tumors were treated with the indicated anti-CTLA4 on days 8, 11, and 14 post tumor cell implantation, as explained supra. The mice in which tumors displayed a CR were re-challenged with implantation of MC38 cells on the opposite flank. TABLE 12 shows the individual mouse tumor volumes (mm³) of the original or re-challenge tumors on the final day of the study (73 days after the original tumor cell implantation and 30 days after the re-challenge implantation). There was no growth of re-challenge tumors in mice in which the original tumor remained a CR. The 3 instances of growth seen in the re-challenge tumors were in mice in which the original tumor had started to re-grow (see TABLE 12). The results also indicated that CTLA4.A2 may induce protective systemic anti-tumor immunity even when the primary tumor (original tumor) relapses (see TABLE 13).

TABLE 12

| | Ipilimumab | Ipilimumab | CTLA4.A2 | CTLA4.A2 | CTLA4.A14 | CTLA4.A14 |
|---|---|---|---|---|---|---|
| | (original | (re-challenge | (original | (re-challenge | (original | (re-challenge |
| | tumor) | tumor) | tumor) | tumor) | tumor) | tumor) |
| Tumor | 0 | 0 | 0 | 0 | 105.7 | 85.3 |
| Volume | 1822.3 | 149.6 | 0 | 0 | 0 | 0 |
| (mm³) | 0 | 0 | 0 | 0 | 913.3 | 98.1 |
| | 0 | 0 | 0 | 0 | 0 | 0 |
| | 0 | 0 | 1415 | 0 | 0 | 0 |
| | 0 | 0 | 0 | 0 | 0 | 0 |
| | | | 678.9 | 0 | | |
| | | | 0 | 0 | | |

TABLE 13

| | % of |
|---|---|
| | secondary |
| | tumors that grew |
| | if primary |
| Antibody | tumor relapsed |
| Ipilimumab | 100% (1 of 1) |
| CTLA4.A2 | 0% (0 of 2) |
| CTLA4.A14 | 100% (2 of 2) |

### 8.6. Example 6: Influence of Increased Dosage of CLTA-4 ABPs

MC38 Tumors Treated with Anti-CTLA-4

[0328] Between 2 and 8 transgenic mice expressing human CTLA-4 (hCTLA-4 KI mice) were implanted with MC38 tumor cells on the right flank. Randomization started when the mean tumor size reached 98.5 mm². The hCTLA-4 KI mice were treated with 5 mg/kg of the indicated anti-CTLA4 bi-weekly for 5 doses starting on day 0 post-randomization. The administered antibodies are shown in TABLE 14. CTLA4.A14.2a is antibody A14 cloned onto a mouse IgG2a backbone, which enhances ADCC activity. The 297 suffix denotes that the hIgG1 Fc was mutated at the N297 amino acid to eliminate glycosylation and thus Fc effector function including ADCC.

### A) Tumor Growth Inhibition

[0329] Over the course of the study, tumor growth inhibition was determined using the formula below:

$$Mean \% Inhibition = ( mean ( C ) - mean ( T ) ) / mean ( C ) * 100 \%$$

[0330] T—current group value
[0331] C—control group value

[0332] The results showed that antibodies lacking Fc activity had reduced efficacy overall. These antibodies were still able to induce tumor regression in some animals, indicating that anti-CTLA4 works by both Fc-dependent and Fc-independent mechanisms of action, and indicating that anti-CTLA4s lacking Fc activity, including ADCC and ADCP, can induce anti-tumor responses (TABLEs 14 and 15).

TABLE 14

| | Mean Inhibition | | | | | | |
|---|---|---|---|---|---|---|---|
| Study Day | 0 | 3 | 6 | 10 | 13 | 17 | 20 |
| 1x PBS | n/a | n/a | n/a | n/a | n/a | n/a | n/a |
| (negative control) | | | | | | | |
| Ipilimumab | 0.31% | −21.76% | 12.56% | 75.43% | 91.55% | 95.54% | 98.71% |
| CTLA4.A5 | 0.74% | −28.09% | −6.22% | 64.17% | 87.32% | 98.32% | 100.00% |
| CTLA4.A14 | −0.56% | −13.30% | 5.33% | 68.17% | 86.21% | 92.79% | 97.52% |
| CTLA4.A12 | 0.40% | −32.59% | −14.13% | 57.48% | 83.00% | 94.99% | 98.04% |
| CTLA4.A8 | 0.26% | −18.48% | −14.18% | 52.53% | 78.37% | 96.15% | 97.96% |
| CTLA4.A7 | −0.61% | −7.67% | 10.04% | 76.74% | 94.36% | 98.88% | 100.00% |
| CTLA4.A2 | 0.27% | −23.97% | −9.95% | 60.95% | 89.33% | 98.35% | 100.00% |
| CTLA4.A13 | −1.15% | −7.61% | 6.23% | 49.18% | 64.82% | 93.82% | 95.23% |
| CTLA4.A5.2a | 0.88% | 11.78% | 27.51% | 66.64% | 89.02% | 96.85% | 100.00% |
| CTLA4.A14.2a | 1.04% | −7.89% | 21.12% | 45.60% | 84.83% | 97.30% | 100.00% |
| Ipilimumab.297 | 0.68% | 8.27% | 21.37% | 22.75% | 16.02% | 25.70% | 26.39% |
| CTLA4.A5.297 | −0.33% | 17.56% | 18.58% | 5.70% | −15.40% | 4.65% | 13.61% |

TABLE 15
% of each group in which tumor had started
to regress by day 13 post treatment initiation

| | |
|---|---|
| 1× PBS (negative control) | 0% |
| Ipilimumab | 100% |
| CTLA4.A5 | 100% |
| CTLA4.A14 | 100% |
| CTLA4.A12 | 88% |
| CTLA4.A8 | 100% |
| CTLA4.A7 | 100% |
| CTLA4.A2 | 100% |
| CTLA4.A13 | 86% |
| CTLA4.A5.2a | 100% |
| CTLA4.A14.2a | 100% |
| Ipilimumab.297 | 25% |
| CTLA4.A5.297 | 14% |

### B) Histopathological Analysis:

[0333] The hCTLA-4 mice were euthanized and their right kidneys were harvested for histopathological analysis. Tissue was formalin-fixed and paraffin-embedded, and cut in 5 m sections that were placed on glass slides for standard hematoxylin and eosin (H&F) staining as well as anti-IgG and anti-C3 immunohistochemistry (IHC) staining. Stained slides were prepared as digital images. A board-certified veterinary pathologist with experience in laboratory animals and toxicologic pathology evaluated the H&F images for any findings and evaluated the anti-IgG and C3 slides for location, intensity, and percent of positive staining. Findings in H&F images were scored on a scale from 0 to 5 (0=within normal limits, 1=minimal findings or the least change discernible, 2=mild findings, 3=moderate, 4=marked, and 5=severe or to the greatest extent possible). Findings in IHC images were scored on a scale of 1 to 4 for intensity (0=negative, 1=minimal or slightly positive and 4=very dark), and as a percent of the positive cells in the glomeruli (after reviewing at least 5 glomeruli).

[0334] The H&F, immunoglobulin, or C3 stain images were scored by a blinded pathologist and the results are shown in FIG. 4. The main H&F finding was that leukocytes in the renal interstitium are not usually involved in glomeruli. Ig and C3 deposition in the glomeruli scoring are also shown in FIG. 4.

### C) Alkaline Phosphatase:

[0335] The hCTLA-4 mice were also analyzed for changes in alkaline phosphatase level. The level of alkaline phosphatase in the serum was determined using comprehensive diagnostic rotors on ABAXIS VetScan VS2.

[0336] The study found that ipilimumab (IPI) elevates alkaline phosphatase levels, which may be an indication of immune-mediated hepatitis. The CTLA4 antibodies (e.g., CTLA4.A14.2A) showed a decrease in elevation of alkaline phosphatase levels (FIG. 5). This decreased elevation in alkaline phosphatase induced by the presently disclosed CTLA4 antibodies may indicate they are less likely to induce immune-mediated hepatitis than treatments such as ipilimumab.

### 8.7. Example 7: Influence of CTLA-4 ABPs on a Second Tumor Model

RM1 Tumors Treated with Anti-CTLA-4

[0337] Transgenic mice expressing human CTLA-4 (hCTLA-4 KI mice) were implanted with RM1 tumor cells on the right flank. (Human IgG1 isotype negative control n=7, atezolimumab n=8, n=11 for all other groups). The hCTLA4 KI mice were treated with the antibodies indicated in TABLE 16. The CTLA4 antibodies were dosed at 5 mg/kg on days 0, 3, and 6 post randomization and atezolizumab was dosed at 5 mg/kg biweekly for 3 weeks starting at day 0 post randomization. Human IgG1 isotype negative control was dosed at 5 mg/kg on Days 0, 3, and 6 post randomization. The mean inhibition of tumor growth was determined at Days 0, 4, 7, 11, 14, and 18 using the following formula:

$$Mean \% Inhibition = ( mean ( C ) - mean ( T ) ) / mean ( C ) * 100 \%$$

[0338] T—current group value
[0339] C—control group value

[0340] TABLE 16 shows that mean inhibition values for the control, the CTLA4 antibodies, and the atezolizumab treatments over the course of the study.

TABLE 16

| | Mean Inhibition | | | | | |
|---|---|---|---|---|---|---|
| Study day | 0 | 4 | 7 | 11 | 14 | 18 |
| Human IgG1 isotype | n/a | n/a | n/a | n/a | n/a | n/a |
| (negative control) | | | | | | |
| Ipilimumab | 2.14% | 11.33% | 30.07% | 41.96% | 52.16% | 57.56% |
| CTLA4.A2 | 0.09% | −12.28% | 25.30% | 43.83% | 50.20% | 59.41% |
| CTLA4.A14 | −0.17% | −7.72% | 22.10% | 36.93% | 48.84% | 55.18% |
| Atezolizumab | 1.83% | 17.66% | 0.41% | −3.02% | −7.89% | −2.89% |
| Atezolizumab + | −0.47% | −3.31% | 18.00% | 29.81% | 30.39% | 35.21% |
| Ipilimumab | | | | | | |
| Atezolizumab + | 1.50% | −6.72% | 23.00% | 41.64% | 40.93% | 44.30% |
| CTLA4.A2 | | | | | | |
| Atezolizumab + | 0.87% | 2.55% | 31.58% | 45.65% | 47.43% | 55.18% |
| CTLA4.A14 | | | | | | |

### 8.8. Example 8: Combination Treatment (Pembrolizumab and Anti-CTLA4s)

[0341] Transgenic mice expressing human CTLA-4 and PD-1 (hCTLA4-hPD1 KI mice, n=8 per treatment group) were implanted subcutaneously with 1×10⁶ MC38 tumor cells in the right flank. The hCTLA4-hPD1 KI mice were treated with a control (lx phosphate buffered saline, or PBS); 2 mg/kg pembrolizumab (pembro) or 2 mg/kg pembro+5 mg/kg anti-CTLA4, administered i.p. with a dose volume of 10 ml/kg per animal as indicated in TABLE 17 twice weekly for three weeks starting on day 1 post-randomization. The mean (%) delta inhibition of tumor growth induced by each treatment in comparison to control treatment was calculated using the formula below and the results are shown in TABLE 17.

$$Mean \% Δ Inhibition = ( ( mean ( C ) - mean ( {C}_{0} ) ) / ( mean ( T ) - mean ( {T}_{0} ) ) ) / ( mean ( C ) - mean ( {C}_{0} ) ) * 100 \%$$

[0342] T—current group value
[0343] T₀—current group initial value
[0344] C—control group value
[0345] C₀—control group initial value

TABLE 17

| | Mean Delta Inhibition | | | | | | |
|---|---|---|---|---|---|---|---|
| Study day | 4 | 7 | 10 | 14 | 17 | 21 | 24 |
| Control | n/a | n/a | n/a | n/a | n/a | n/a | n/a |
| Pembrolizumab | 44.33% | 44.20% | 30.78% | 20.92% | 10.08% | 8.62% | −11.94% |
| Pembrolizumab + | 29.57% | 79.32% | 85.83% | 87.28% | 86.27% | 78.55% | 97.36% |
| CTLA4.A5 | | | | | | | |
| Pembrolizumab + | −82.05% | −5.30% | 41.81% | 50.97% | 55.73% | 52.23% | 66.74% |
| CTLA4.A1 | | | | | | | |

[0346] The study showed that mice treated with pembro alone did not exhibit tumor growth inhibition at day 24, however the addition of the indicated CTLA4 antibodies increased the tumor growth inhibition over the course of the study.

[0347] At the end of the experiment, select tumors were harvested and flow cytometry was conducted to investigate intratumoral immune cell populations. The data indicate that anti-CTLA4s decrease intratumoral Treg populations while increasing intratumoral NK cell populations (FIG. 6).

### 8.9. Example 9: Immune Related Adverse Events

[0348] Transgenic mice expressing human CTLA-4 (hCTLA-4 KI mice) were implanted with MC38 tumor cells on the right flank. The hCTLA-4 KI mice were treated with one mg/kg of the indicated CTLA-4 antibody on days 8, 11, and 14 post-implantation. The mice were weighed on days 8, 11, 14, and 17 post-implantation. Animal counts were: n=8 for ipilimumab, n=9 for A7, n=8 for A2, n=9 for A14, and n=8 for A14.2. The percent changes in body weight of the mice receiving the indicated anti-CTLA4 treatments are shown in FIG. 7.

[0349] The mice treated with CTLA4.A7, CTLA4.A14, and CTLA4.A14.2a did not appear to exhibit weight loss after the final dose of anti-CTLA4 (FIG. 7). This finding was unexpected because immune-related Adverse Events (irAE) have been reported to be greater when anti-CTLA4s with enhanced ADCC (e.g., CTLA.A14.2a) are administered. This data suggest that anti-CTLA4s with reduced blocking activity may limit induction of irAEs even when ADCC is enhanced.

### 8.10. Example 10: Peripheral Flow Cytometry

[0350] Transgenic mice expressing human CTLA-4 (hCTLA-4 KI mice) were implanted with MC38 tumor cells in the right flank. The hCTLA-4 KI mice were treated with one mg/kg of the indicated CTLA-4 antibody on days 8, 11, and 14 post-implantation. Peripheral flow cytometry was performed on day 27. 100 μL of blood was used for staining. The findings from the peripheral blood flow cytometry are shown in FIGS. 8-10.

[0351] The results indicated that CTLA4.A2 and CTLA4.A14 decrease the elevation of peripheral T cells (CD3+). Enhancing ADCC with CTLA4.A14.2a increased newly activated T cells (CD69+). CTLA4.A2 and CTLA4.A14 resulted in fewer non-conventional regulatory cells (CD4+PD1+, CD4+ICOS+). (See FIG. 8).

[0352] The results also indicated that CTLA4.A2 and CTLA4.A14 better enhance CD8+ T cells. CTLA4.A2 better enhanced newly activated T cells (CD8+CD69+) and led to decreased T cell exhaustion (CD8+PD1+) relative to Ipilimumab. ICOS has been described as a pharmacodynamic marker for anti-CTLA4. Enhancing ADCC with CTLA4.A14.2a appeared to further elevate CD8+ICOS+ cells (FIG. 9). The results also indicated that CTLA4.A2 and CTLA4.A14.2a lead to decreased peripheral immune activation relative to Ipilimumab, as judged by the frequency of dendritic cells (DCs) and activated DCs (CD86+). (see FIG. 10).

### 8.11. Example 11: Treatment with Low Dose CTLA-4 Study

[0353] Transgenic mice expressing human CTLA-4 (hCTLA-4 KI mice) were implanted subcutaneously in the right flank region with MC38 tumor cells (1E6) in 0.1 ml of PBS for tumor development. The cells in exponential growth phase were harvested and quantitated by cell counter before tumor implantation. The hCTLA-4 KI mice were randomized when the mean tumor volume was 96.15 mm³ and treated with 0.3 mg/kg of the indicated anti-CTLA4, ipilimumab, or human IgG1 isotype control (Isotype) on days 0, 3 and 6 post-randomization. Tumor volume and mean % of inhibition was determined as described in Example 4. CTLA4.A2 and CTLA4.A14 resulted in significantly higher tumor inhibition over the 18 days of the study. The results of the study are shown in TABLE 18 and FIG. 11.

TABLE 18

| | Dates/Study Days | | | | | |
|---|---|---|---|---|---|---|
| | Dec. 6, 2019 | Dec. 10, 2019 | Dec. 13, 2019 | Dec. 17, 2019 | Dec. 20, 2019 | Dec. 24, 2019 |
| Group | 0 | 4 | 7 | 11 | 14 | 18 |
| Isotype | | | | | | |
| Ipilimumab | −0.17% | 9.33% | 18.68% | 22.37% | 27.23% | 11.84% |
| CTLA4.A2 | 0.22% | 13.00% | 23.03% | 49.09% | 60.03% | 59.54% |
| CTLA4.A14 | 0.01% | 23.39% | 35.06% | 53.05% | 57.50% | 45.41% |

### 9. INCORPORATION BY REFERENCE

[0354] All publications, patents, patent applications and other documents cited in this application are hereby incorporated by reference in their entireties for all purposes to the same extent as if each individual publication, patent, patent application or other document were individually indicated to be incorporated by reference for all purposes.

### 10. EQUIVALENTS

[0355] While various specific embodiments have been illustrated and described, the above specification is not restrictive. It will be appreciated that various changes can be made without departing from the spirit and scope of the present disclosure(s). Many variations will become apparent to those skilled in the art upon review of this specification.

### Table 19 Provides Sequences for Antibody Light Chains, Heavy Chains, CDRs, and Human CTLA4.

TABLE 19

| SEQ | | |
|---|---|---|
| ID | | Chain |
| NO | Sequence | (Antibody) |
| 1 | EIVLTQSPGTLSLSPGEGATLSCRASQSFSSNYLAWYQQKPGQAPRLLIYGASSRA | L1 (A1) |
| | TGIPDRFSGSGSGTDFTLTISRLEPEDFAVYYCQQYGTSPFTFGPGTKVDIK | |
| 2 | EIVLTQSPGTLSLSPGERATLSCRASQSVSSSYLAWYQQKPGQAPRLLIYGASSRA | L2 (A2) |
| | TGIPDRFSGSGSGTDFTLTISRLEPEDFAVYYCQQYGRSPFTFGPGTKVDIK | |
| 3 | EIVLTQSPGTLSLSPGERATLSCRASQSVSSSYLAWYQQKPGQAPRLLIYGASSRA | L3 (A3) |
| | TGIPDRFSGSGSGTDFTLTISRLEPEDFAVYYCQQYGSSPFTFGPGTKVDIK | |
| 4 | EIVLTQSPGTLSLSPGDRATLSCRASQSGSSSYLAWYQQKPGQAPRLLIYGASSRA | L4 (A4) |
| | TGIPDRFSGSGSGTDFTLTISRLEPEDFAVYYCQQYGTSPFTSGPGTKVDIK | |
| 5 | EIVLTQSPGTLSLSPGDRATLSCRASQSGSSSYLAWYQQKPGQAPRLLIYGASSRA | L5 (A5) |
| | TGIPDRFSGSGSGTDFTLTISRLEPEDFAVYYCQQYGTSPFTSGPGTKVDIK | |
| 6 | DIQMTQSPSSLSASVGDRVTITCRASQSISSYLNWYQQKPGKAPKLLIYAASSLQS | L6 (A6) |
| | GVPSRFSGSGSGTDFTLTISSLQPEDFATYYCQQSYSTPFTFGPGTKVDIK | |
| 7 | EIVLTQSPGTLSLSPGERATLSCRASQSVSSSYLAWYQQKPGQAPRLLIYGASSRA | L7 (A7) |
| | TGIPDRFSGSGSGTDFTLTISRLEPEDFAVYYCQQYGSSPFTFGPGTKVDIK | |
| 8 | EIVLTQSPGTLSLSPGERATLSCRASQSVSYLAWYQQKPGQAPRLLIYGASSRATG | L8 (A8) |
| | IPDRFSGSGSGTDFTLTISRLEPEDFAVYYCQQYGSSPWTFGQGTKVEIK | |
| 9 | DIQMTQSPSSLSASVGDRVTITCRASQSISSYLNWYQQKPGKAPKLLIYAASSLQS | L9 (A9) |
| | GVPSRFSGSGSGTDFTLTISSLQPEDFATYYCQQSYSTPFTFGPGTKVDIK | |
| 10 | EIVLTQSPGTLSLSPGERATLSCRASQSVSSSYLAWYQQKPGQAPRLLIYGASSRA | L10 (A10) |
| | TGIPDRFSGSGSGTDFTLTISRLEPEDFAVYYCQQYGSSPFTFGPGTKVDIK | |
| 11 | DIQLTQSPSFLSASVGDRVTITCRASQGISSYLAWYQQKPGKAPKLLIYAASTLQS | L11 (A11) |
| | GVPSRFSGSGSGTEFTLTISSLQPEDFATYYCQQLNSYPPTFGQGTKVEIK | |
| 12 | EIVLTQSPGTLSLSPGERATLSCRASQSVSSSYLAWYQQKPGQAPRLLIYGASSRA | L12 (A12) |
| | TGIPDRFSGSGSGTDFTLTISRLEPEDFAVYYCQQYGTSPWTFGQGTKVEIK | |
| 13 | EIVLTQSPGTLSLSPGERATLSCRASQSVSSSYLAWYQQKPGQAPRLLIYGASSRA | L13 (A13) |
| | TGIPDRFSGSGSGTDFTLTISRLEPEDFAVYYCQQYGSSPFTFGPGTKVDIK | |
| 14 | EIVLTQSPGTLSLSPGERATLSCRASQSVSSSYLAWYQQKPGQAPRLLIYGASSRA | L14 (A14) |
| | TGIPDRFSGSGSGTDFTLTISRLEPEDFAVYYCQQYGSSPWTSGQGTKVEIK | |
| 15 | EIVLTQSPGTLSLSPGERATLSCRASQSVSSSYLAWYQQKPGQAPRLLIYGASSRA | L15 (A15) |
| | TGIPDRFSGSGSGTDFTLTISRLEPEDFAVYYCQQYGSSPFTFGPGTKVDIK | |
| 16 | DIQMTQSPSSLSASVGDRVTITCRASQGISNYLAWYQQKPGKVPKLLIYAASTLQS | L16 (A16) |
| | GVPSRFSGSGSGTDFTLTISSLQPEDVATYYCQNYNSAPWTFGQGTKVEIK | |
| 17 | DIQMTQSPSSLSASVGDRVTITCRASQAIRNDLGWYQQKPGKAPKRLIYAASSLQS | L17 (A17) |
| | GVPPRFSGSGSGTEFTLTISSLQPEDFATYYCLQHNSYPLTFGGGTKVEIK | |
| 18 | EIVLTQSPGTLSLSPGERATLSCRASQSVSYLAWYQQKPGQAPRLLIYGASSRATG | L18 (A18) |
| | IPDRFSGSGSGTDFTLTISRLEPEDFAVYYCQQYGSSPWTFGQGTKVEIK | |
| 19 | EIVLTQSPGTLSLSPGERATLSCRASQSVSSSYLAWYQQKPGQAPRLLIYGASSRA | L19 (A19) |
| | TGIPDRFSGSGSGTDFTLTISRLEPEDFAVYYCQQYGSSSMYTFGQGTKLEIK | |
| 20 | EIVLTQSPGTLSLSPGERATLSCRASQSVSSSYLAWYQQKPGQAPRLLIYGASSRA | L20 (A20) |
| | TGIPDRFSGSGSGTDFTLTISRLEPEDFAVYYCQQYGRSPFTFGPGTKVDIK | |
| 21 | DIVMTQSPLSLPVTPGEPASISCRSSQSLLHSNGYNYLDWYLQKPGQSPQLLIYLG | L21 (A21) |
| | SNRASGVPDRFSGSGSGTDFTLKISRVEAEDVGVYYCMQTLQTPLTFGGGTKVEI | |
| | K | |
| 22 | DIQMTQSPSSLSASVGDRVTITCRASQAIRNDLGWYQQKPGKAPKRLIYAASSLQS | L22 (A22) |
| | GVPPRFSGSGSGTEFTLTISSLQPEDFATYYCLQHNSYPLTFGGGTKVEIK | |
| 23 | EIVLTQSPGTLSLSPGERATLSCRASQSVSSSYLAWYQQKPGQAPRLLIYGASSRA | L23 (A23) |
| | TGIPDRFSGSGSGTDFTLTISRLEPEDFAVYYCQQYGPSPWTFGQGTKVEIK | |
| 24 | DIQMTQSPSSLSASVGDRVTITCRASQSISSYLNWYQQKPGKAPKLLIYAASSLQS | L24 (A24) |
| | GVPSRFSGSGSGTDFTLTISSLQPEDFATYYCQQSYRTPFTFGPGTKVDIK | |
| 25 | EIVMTQSPATLSLSPGERATLSCRASQSVSSSYLSWYQQKPGQAPRLLIYGASTRA | L25 (A25) |
| | TGIPARFSGSGSGTDFTLTISNLQPEDFAVYYCQQGYNLPFTAGPGTKVDIK | |
| 26 | DVVMTQSPLSLPVTLGQPASISCRSSQSLVYSDGNTYLNWFQQRPGQSPRRLIYK | L26 (A26) |
| | VSNRDSGVPDRFSGSGSGTDFTLKISRVEAEDVGVYYCMQGTHWPITSGQGTRLE | |
| | IK | |
| 27 | EIVLTQSPGTLSLSPGERATLSCRASQSVSSSYLAWYQQKPGQAPRLLIYGASSRA | L27 (A27) |
| | TGIPDRFSGSGSGTDFTLTISRLEPEDFAVYHCQQYGRSPWTLGQGTKVEIK | |
| 28 | EIVLTQSPGTLSLSPGERATLSCRASQSVSSSYLAWYQQKPGQAPRLLIYGASSRA | L28 (A28) |
| | TGIPDRFSGSGSGTDFTLTISRLEPEDFAVYYCQQYGSSPWTSGQGTKVEIK | |
| 101 | QVQLVESGGGVVQPGRSLRLSCAASGFTFSSFGMHWVRQAPGKGLEWVAVIWY | H1 (A1) |
| | DGRNKYYVDSVKGRFTISRDNSNNTLYLQMNSLRAEDTAVYYCARGEFFGEFFD | |
| | YWGQGTLVTVSSA | |
| 102 | QVQLVESGGGVVQPGRSLRLSCAASGFTFSNYGMNWVRQAPGKGLEWVAVIWY | H2 (A2) |
| | DGRNKHYADSVKGRFTISRDNSKNTLYLQMNSLRAEDTAVYYCARGGDWGPYF | |
| | DYWGQGTLVTVSSA | |
| 103 | QVQLVESGGGVVQPGRSLRLSCIASGFTFSSYGMHWVRQAPGKGLEWVAVNWY | H3 (A3) |
| | DGSNKHYADSVKGRFTISRDNSKNTLYLQMNSLRAEDTAVYYCARGGVWGPYF | |
| | DYWGQGTLVTVSSA | |
| 104 | QVQLVESGGGVVQPGRSLRISCAASGFTFSSYGIHWVRQAPGKGLQWVAVIWYD | H4 (A4) |
| | GRNKYYADSVKGRFTISRDNSKNTLYLQMNSLRAEDTAVYYCSRSGSFGAFDIW | |
| | GQGTMVTVSSA | |
| 105 | QVQLVESGGGVVQPGRSLRLSCAASGFTFSSYGMHWVRQAPGKGLEWVAVIWY | H5 (A5) |
| | DGNNKYYADSVKGRFTISRDNSKNTLYLQMYSLRAEDTAVYYCARGGILAAGIF | |
| | DYWGQGTLVTVSSA | |
| 106 | QVQLVESGGGVVQPGRSLRLSCAASGFTFSSYGMHWVRQAPGKGLEWVAVIWY | H6 (A6) |
| | DGSYKYYADSVKGRFTISRDDSKNTLYLQMSSLRAEDTAVYYCARAPHYAILTG | |
| | YYEDYWGQGTLVTVSSA | |
| 107 | QVQLVESGGGVVQPGRSLRLSCAASGFTLSSFGMHWVRQAPGKGLEWVAVIWY | H7 (A7) |
| | DGSNKYYADSVKGRFIISRDNSKTALYLQMNSLRAEDTAVYYCARAHYFGAFDI | |
| | WGQGTMVTVSSA | |
| 108 | QVQLVESGGGVVQPGRSLRLSCAASGFTFSRYGMHWVRQAPGKGLEWVAVIWY | H8 (A8) |
| | DGRNKYYADSVKGRFTISRDNSKNTLYLQMNSLRAEDTALYSCARAGELGPFDY | |
| | WGQGTLVTVSSA | |
| 109 | QVQLVESGGGVVQPGRSLRLSCAASGFTFSSHGMHWVRQAPGKGLEWVAVIWY | H9 (A9) |
| | DGSNKHYADSVKGRFTISRDNSKNTLYLQMNSLRAEDTAVYYCARGDILTGYYG | |
| | YWGQGTLVTVSSA | |
| 110 | QVQLVESGGGVVQPGRSLRLSCVASGFTLSSYGMHWVRQAPGKGLEWVAVIWY | H10 (A10) |
| | DGSNKHYADSVKGRFTISRDNSKNTLSLQMNSLRAEDTAVYYCARGGQLGPFDY | |
| | WGQGTLVTVSSA | |
| 111 | QVQLVESGGGVVQPGRSLRLSCAASGFTFSSYGMHWVRQAPGKGLEWVAVIWY | H11 (A11) |
| | DVGNKYYIDSVKGRFTISRDNSKNTLYLQMNSLRAEDTAVYYCARDYYGSGSPR | |
| | HFDYWGQGTLVTVSSA | |
| 112 | QVQLVESGGGVVQPGRSLRLSCAASGFTFSSYGMHWVRQAPGKGLEWVAVIWY | H12 (A12) |
| | DGSNKYYADSVKGRFTFSRDNSKNTLYLQMNSLRAEDTAVYYCARGGLMGAFD | |
| | YWGQGTLVTVSSA | |
| 113 | QVQLVESGGGVVQPGRSLRLSCAASGFTFSSYGMHWVRQAPGKGLEWVAVIWY | H13 (A13) |
| | DGRNKDYADSVKGRITISRDNSKNTLYLQMNSLRAEDTAVYYCARGGLLGPYFD | |
| | YWGQGTLVTVSSA | |
| 114 | QVQLVESGGGVVQPGRSLRLSCAASGFTFSSYGMHWVRQAPGTGLEWVAVIWY | H14 (A14) |
| | EGRNKYYADPVKGRFTISRDNSKNTLYLQMNSLRDDDTAVYYCARAGDLGAFDI | |
| | WGQGTMVTVSSA | |
| 115 | QVQLVESGGGVVQPGRSLRLSCAASGFTFRSYGMHWVRQAPGKGLEWVAVIWY | H15 (A15) |
| | DGSNKHYADSVKGRFTISRDNSKNTLYLQMNSLRAEDTAVYYCARNGLIGAFDI | |
| | WGQGTMVTVSSA | |
| 116 | QVQLVESGGGVVQPGRSLRLSCAASGFTFSSYGIHWVRQAPGKGLEWVAVIWYD | H16 (A16) |
| | GSNKYYADSVKGRFTISRDNSKNTLYLQMNSLRAEDTAVYYCARGSLLGPFDYW | |
| | GQGTLVTVSSA | |
| 117 | EVQLVESGGGLVQPGGSLRLSCAASGFTFSNYAMSWVRQAPGKGLEWVSAISGG | H17 (A17) |
| | GLSTYYADSVKGRFTISRDNSKNTLYLQMNSLRAEDTAVYYCAKDLLWLGFDY | |
| | WGQGTLVTVSSA | |
| 118 | QVQLVESGGGVVQPGRSLRLSCAASGFTFSSYGMHWVRQAPGKGLEWVAVIWY | H18 (A18) |
| | DGSNKFYADSVKGRFTISSDNSKNTLYLQMNSLRAEDTAVYYCARGGHLGSFDY | |
| | WGQGTLVTVSSA | |
| 119 | QVQLVQSGAEVKKPGASVKVSCKASGYTFTSYYMHWVRQAPGQGLEWMGIINP | H19 (A19) |
| | SVGSTSYAQKFQGRVTMTRDTSTSTVYMELSSLRSEDTAVYYCAREVRVRGVIIP | |
| | FFDYWDQGTLVTVSSA | |
| 120 | QVQLVQSGAEVKKPGASVKVSCKASGYTFTSYGISWVRQAPGQGLEWMGWISA | H20 (A20) |
| | YNGNTNYAQKFQGRVTMTTDTSTSTAYMELRSLRSDDTAVYYCAKVSGYFDYW | |
| | GQGTLVTVSSA | |
| 121 | QVQLVESGGGVVQPGRSLRLSCAASGFTFSSYGMHWVRQAPGKGLEWVAVIWY | H21 (A21) |
| | DGNNKYYADSVKGRFTISRDNSKNTLYLHMNSLRADDTAVYYCARMLRGAPYY | |
| | YGMDVWGQGTTVTVSSA | |
| 122 | EVQLVESGGGLVQPGGSLRLSCAASGFTFSSYAMSWVRQAPGKGLEWVSGISGS | H22 (A22) |
| | GGSTYYADSVKGRFTISRDNSKNTLYLQMNSLRAEDTAVYYCAKLGIAWYFDV | |
| | WGRGTLVTVSSA | |
| 123 | QVQLVQSGAEVKKPGASVKVSCKASGYTFTSYGISWVRQAPGQGLEWMGWISA | H23 (A23) |
| | YNGNTYYAQKFQGRVTMTTDTSTSTAYVELRSLRSDDTAVYYCARVTGRDAFDI | |
| | WGQGTMVTVSSA | |
| 124 | QVQLVQSGAEVKKPGASVKVSCKASGYTFTSYGISWVRQAPGQGLECMGWISA | H24 (A24) |
| | YNGNTNYAQKFQGRVTMITDTSTSTAYMELRSLRSDDTAVYYCARVGPINLDY | |
| | WGQGTLVTVSSA | |
| 125 | QVQLVQSGAEVKKPGASVKVSCKASGYTFTNYGISWVRQAPGQGLEWMGWISV | H25 (A25) |
| | YNGNTNYAQKFQGRVTMTTDTSTSTAYMELRSLISDDTAVYYCARLGKGLFDY | |
| | WGQGTLVTVSSA | |
| 126 | QVQLVQSGAEVKKPGASVKVSCKASDYTFTYYGISWVRQAPGQGLEWMGWISA | H26 (A26) |
| | YNGNTNYAQKLQGRVTMTTDTSTNTAYLELRSLRSDDTAVYYCARDYYDSSGY | |
| | FDYWGQGTLVTVSSA | |
| 127 | QVQLVQSGAEVKKPGASVKVSCKASGYTFTSYGISWVRQAPGQGLEWMGWISA | H27 (A27) |
| | YNGNTNYAQKLQGRVTMTTDTSTSTAYMELRSLRSDDTAVYYCGRWVRGVEY | |
| | WGQGTLVTVSSA | |
| 128 | QVQLVESGGGVVQPGRSLGLSCAASGFTFSTYGMHWVRQAPGKGLEWVAVTLY | H28 (A28) |
| | DGSNKYYADSVKGRFTISRDNSKNTLYLQMNSLRAEDTAVYYCARASLTGSFDY | |
| | WGQGTLVTVSSA | |
| 1001 | QSFSSNY | CDR1-L1 (A1) |
| 1002 | QSVSSSY | CDR1-L2 (A2) |
| 1003 | QSVSSSY | CDR1-L3 (A3) |
| 1004 | QSGSSSY | CDR1-L4 (A4) |
| 1005 | QSGSSSY | CDR1-L5 (A5) |
| 1006 | QSISSY | CDR1-L6 (A6) |
| 1007 | QSVSSSY | CDR1-L7 (A7) |
| 1008 | QSVSY | CDR1-L8 (A8) |
| 1009 | QSISSY | CDR1-L9 (A9) |
| 1010 | QSVSSSY | CDR1-L10 (A10) |
| 1011 | QGISSY | CDR1-L11 (A11) |
| 1012 | QSVSSSY | CDR1-L12 (A12) |
| 1013 | QSVSSSY | CDR1-L13 (A13) |
| 1014 | QSVSSSY | CDR1-L14 (A14) |
| 1015 | QSVSSSY | CDR1-L15 (A15) |
| 1016 | QGISNY | CDR1-L16 (A16) |
| 1017 | QAIRND | CDR1-L17 (A17) |
| 1018 | QSVSY | CDR1-L18 (A18) |
| 1019 | QSVSSSY | CDR1-L19 (A19) |
| 1020 | QSVSSSY | CDR1-L20 (A20) |
| 1021 | QSLLHSNGYNY | CDR1-L21 (A21) |
| 1022 | QAIRND | CDR1-L22 (A22) |
| 1023 | QSVSSSY | CDR1-L23 (A23) |
| 1024 | QSISSY | CDR1-L24 (A24) |
| 1025 | QSVSSSY | CDR1-L25 (A25) |
| 1026 | QSLVYSDGNTY | CDR1-L26 (A26) |
| 1027 | QSVSSSY | CDR1-L27 (A27) |
| 1028 | QSVSSSY | CDR1-L28 (A28) |
| 2001 | GAS | CDR2-L1 (A1) |
| 2002 | GAS | CDR2-L2 (A2) |
| 2003 | GAS | CDR2-L3 (A3) |
| 2004 | GAS | CDR2-L4 (A4) |
| 2005 | GAS | CDR2-L5 (A5) |
| 2006 | AAS | CDR2-L6 (A6) |
| 2007 | GAS | CDR2-L7 (A7) |
| 2008 | GAS | CDR2-L8 (A8) |
| 2009 | AAS | CDR2-L9 (A9) |
| 2010 | GAS | CDR2-L10 (A10) |
| 2011 | AAS | CDR2-L11 (A11) |
| 2012 | GAS | CDR2-L12 (A12) |
| 2013 | GAS | CDR2-L13 (A13) |
| 2014 | GAS | CDR2-L14 (A14) |
| 2015 | GAS | CDR2-L15 (A15) |
| 2016 | AAS | CDR2-L16 (A16) |
| 2017 | AAS | CDR2-L17 (A17) |
| 2018 | GAS | CDR2-L18 (A18) |
| 2019 | GAS | CDR2-L19 (A19) |
| 2020 | GAS | CDR2-L20 (A20) |
| 2021 | LGS | CDR2-L21 (A21) |
| 2022 | AAS | CDR2-L22 (A22) |
| 2023 | GAS | CDR2-L23 (A23) |
| 2024 | AAS | CDR2-L24 (A24) |
| 2025 | GAS | CDR2-L25 (A25) |
| 2026 | KVS | CDR2-L26 (A26) |
| 2027 | GAS | CDR2-L27 (A27) |
| 2028 | GAS | CDR2-L28 (A28) |
| 3001 | QQYGTSPFT | CDR3-L1 (A1) |
| 3002 | QQYGRSPFT | CDR3-L2 (A2) |
| 3003 | QQYGSSPFT | CDR3-L3 (A3) |
| 3004 | QQYGTSPFT | CDR3-L4 (A4) |
| 3005 | QQYGTSPFT | CDR3-L5 (A5) |
| 3006 | QQSYSTPFT | CDR3-L6 (A6) |
| 3007 | QQYGSSPFT | CDR3-L7 (A7) |
| 3008 | QQYGSSPWT | CDR3-L8 (A8) |
| 3009 | QQSYSTPFT | CDR3-L9 (A9) |
| 3010 | QQYGSSPFT | CDR3-L10 (A10) |
| 3011 | QQLNSYPPT | CDR3-L11 (A11) |
| 3012 | QQYGTSPWT | CDR3-L12 (A12) |
| 3013 | QQYGSSPFT | CDR3-L13 (A13) |
| 3014 | QQYGSSPWT | CDR3-L14 (A14) |
| 3015 | QQYGSSPFT | CDR3-L15 (A15) |
| 3016 | QNYNSAPWT | CDR3-L16 (A16) |
| 3017 | LQHNSYPLT | CDR3-L17 (A17) |
| 3018 | QQYGSSPWT | CDR3-L18 (A18) |
| 3019 | QQYGSSSMYT | CDR3-L19 (A19) |
| 3020 | QQYGRSPFT | CDR3-L20 (A20) |
| 3021 | MQTLQTPLT | CDR3-L21 (A21) |
| 3022 | LQHNSYPLT | CDR3-L22 (A22) |
| 3023 | QQYGPSPWT | CDR3-L23 (A23) |
| 3024 | QQSYRTPFT | CDR3-L24 (A24) |
| 3025 | QQGYNLPFT | CDR3-L25 (A25) |
| 3026 | MQGTHWPIT | CDR3-L26 (A26) |
| 3027 | QQYGRSPWT | CDR3-L27 (A27) |
| 3028 | QQYGSSPWT | CDR3-L28 (A28) |
| 4001 | GFTFSSFG | CDR1-H1 (A1) |
| 4002 | GFTFSNYG | CDR1-H2 (A2) |
| 4003 | GFTFSSYG | CDR1-H3 (A3) |
| 4004 | GFTFSSYG | CDR1-H4 (A4) |
| 4005 | GFTFSSYG | CDR1-H5 (A5) |
| 4006 | GFTFSSYG | CDR1-H6 (A6) |
| 4007 | GFTLSSFG | CDR1-H7 (A7) |
| 4008 | GFTFSRYG | CDR1-H8 (A8) |
| 4009 | GFTFSSHG | CDR1-H9 (A9) |
| 4010 | GFTLSSYG | CDR1-H10 (A10) |
| 4011 | GFTFSSYG | CDR1-H11 (A11) |
| 4012 | GFTFSSYG | CDR1-H12 (A12) |
| 4013 | GFTFSSYG | CDR1-H13 (A13) |
| 4014 | GFTFSSYG | CDR1-H14 (A14) |
| 4015 | GFTFRSYG | CDR1-H15 (A15) |
| 4016 | GFTFSSYG | CDR1-H16 (A16) |
| 4017 | GFTFSNYA | CDR1-H17 (A17) |
| 4018 | GFTFSSYG | CDR1-H18 (A18) |
| 4019 | GYTFTSYY | CDR1-H19 (A19) |
| 4020 | GYTFTSYG | CDR1-H20 (A20) |
| 4021 | GFTFSSYG | CDR1-H21 (A21) |
| 4022 | GFTFSSYA | CDR1-H22 (A22) |
| 4023 | GYTFTSYG | CDR1-H23 (A23) |
| 4024 | GYTFTSYG | CDR1-H24 (A24) |
| 4025 | GYTFTNYG | CDR1-H25 (A25) |
| 4026 | DYTFTYYG | CDR1-H26 (A26) |
| 4027 | GYTFTSYG | CDR1-H27 (A27) |
| 4028 | GFTFSTYG | CDR1-H28 (A28) |
| 5001 | IWYDGRNK | CDR2-H1 (A1) |
| 5002 | IWYDGRNK | CDR2-H2 (A2) |
| 5003 | NWYDGSNK | CDR2-H3 (A3) |
| 5004 | IWYDGRNK | CDR2-H4 (A4) |
| 5005 | IWYDGNNK | CDR2-H5 (A5) |
| 5006 | IWYDGSYK | CDR2-H6 (A6) |
| 5007 | IWYDGSNK | CDR2-H7 (A7) |
| 5008 | IWYDGRNK | CDR2-H8 (A8) |
| 5009 | IWYDGSNK | CDR2-H9 (A9) |
| 5010 | IWYDGSNK | CDR2-H10 (A10) |
| 5011 | IWYDVGNK | CDR2-H11 (A11) |
| 5012 | IWYDGSNK | CDR2-H12 (A12) |
| 5013 | IWYDGRNK | CDR2-H13 (A13) |
| 5014 | IWYEGRNK | CDR2-H14 (A14) |
| 5015 | IWYDGSNK | CDR2-H15 (A15) |
| 5016 | IWYDGSNK | CDR2-H16 (A16) |
| 5017 | ISGGGLST | CDR2-H17 (A17) |
| 5018 | IWYDGSNK | CDR2-H18 (A18) |
| 5019 | INPSVGST | CDR2-H19 (A19) |
| 5020 | ISAYNGNT | CDR2-H20 (A20) |
| 5021 | IWYDGNNK | CDR2-H21 (A21) |
| 5022 | ISGSGGST | CDR2-H22 (A22) |
| 5023 | ISAYNGNT | CDR2-H23 (A23) |
| 5024 | ISAYNGNT | CDR2-H24 (A24) |
| 5025 | ISVYNGNT | CDR2-H25 (A25) |
| 5026 | ISAYNGNT | CDR2-H26 (A26) |
| 5027 | ISAYNGNT | CDR2-H27 (A27) |
| 5028 | TLYDGSNK | CDR2-H28 (A28) |
| 6001 | ARGEFFGEFFDY | CDR3-H1 (A1) |
| 6002 | ARGGDWGPYFDY | CDR3-H2 (A2) |
| 6003 | ARGGVWGPYFDY | CDR3-H3 (A3) |
| 6004 | SRSGSFGAFDI | CDR3-H4 (A4) |
| 6005 | ARGGILAAGIFDY | CDR3-H5 (A5) |
| 6006 | ARAPHYAILTGYYEDY | CDR3-H6 (A6) |
| 6007 | ARAHYFGAFDI | CDR3-H7 (A7) |
| 6008 | ARAGELGPFDY | CDR3-H8 (A8) |
| 6009 | ARGDILTGYYGY | CDR3-H9 (A9) |
| 6010 | ARGGQLGPFDY | CDR3-H10 (A10) |
| 6011 | ARDYYGSGSPRHFDY | CDR3-H11 (A11) |
| 6012 | ARGGLMGAFDY | CDR3-H12 (A12) |
| 6013 | ARGGLLGPYFDY | CDR3-H13 (A13) |
| 6014 | ARAGDLGAFDI | CDR3-H14 (A14) |
| 6015 | ARNGLIGAFDI | CDR3-H15 (A15) |
| 6016 | ARGSLLGPFDY | CDR3-H16 (A16) |
| 6017 | AKDLLWLGFDY | CDR3-H17 (A17) |
| 6018 | ARGGHLGSFDY | CDR3-H18 (A18) |
| 6019 | AREVRVRGVIIPFFDY | CDR3-H19 (A19) |
| 6020 | AKVSGYFDY | CDR3-H20 (A20) |
| 6021 | ARMLRGAPYYYGMDV | CDR3-H21 (A21) |
| 6022 | AKLGIAWYFDV | CDR3-H22 (A22) |
| 6023 | ARVTGRDAFDI | CDR3-H23 (A23) |
| 6024 | ARVGPINLDY | CDR3-H24 (A24) |
| 6025 | ARLGKGLFDY | CDR3-H25 (A25) |
| 6026 | ARDYYDSSGYFDY | CDR3-H26 (A26) |
| 6027 | GRWVRGVEY | CDR3-H27 (A27) |
| 6028 | ARASLTGSFDY | CDR3-H28 (A28) |
| 7001 | MACLGFQRHKAQLNLAARTWPCTLLFFLLFIPVFCKAMHVAQPAVVLASSRGIAS | Human CTLA4 |
| | FVCEYASPGKATEVRVTVLRQADSQVTEVCAATYMMGNELTFLDDSICTGTSSG | |
| | NQVNLTIQGLRAMDTGLYICKVELMYPPPYYLGIGNGTQIYVIDPEPCPDSDFLLW | |
| | ILAAVSSGLFFYSFLLTAVSLSKMLKKRSPLTTGVYVKMPPTEPECEKQFQPYFIPI | |
| | N | |

### Table 20 Provides the Sequence Identifiers for the Light Chain, Heavy Chain, and CDRs of The Indicated Clones

TABLE 20
provides the sequence identifiers for the light chain, heavy chain, and CDRs of the indicated clones

| Antibody | SEQ ID NO | | | | | | | |
|---|---|---|---|---|---|---|---|---|
| Clone | Light | Heavy | CDR1 | CDR2 | CDR3 | CDR1 | CDR2 | CDR3 |
| Number | Chain | Chain | (Light) | (Light) | (Light) | (Heavy) | (Heavy) | (Heavy) |
| 1 | 8000 | 8496 | 8992 | 9488 | 9984 | 10480 | 10976 | 11472 |
| 2 | 8001 | 8497 | 8993 | 9489 | 9985 | 10481 | 10977 | 11473 |
| 3 | 8002 | 8498 | 8994 | 9490 | 9986 | 10482 | 10978 | 11474 |
| 4 | 8003 | 8499 | 8995 | 9491 | 9987 | 10483 | 10979 | 11475 |
| 5 | 8004 | 8500 | 8996 | 9492 | 9988 | 10484 | 10980 | 11476 |
| 6 | 8005 | 8501 | 8997 | 9493 | 9989 | 10485 | 10981 | 11477 |
| 7 | 8006 | 8502 | 8998 | 9494 | 9990 | 10486 | 10982 | 11478 |
| 8 | 8007 | 8503 | 8999 | 9495 | 9991 | 10487 | 10983 | 11479 |
| 9 | 8008 | 8504 | 9000 | 9496 | 9992 | 10488 | 10984 | 11480 |
| 10 | 8009 | 8505 | 9001 | 9497 | 9993 | 10489 | 10985 | 11481 |
| 11 | 8010 | 8506 | 9002 | 9498 | 9994 | 10490 | 10986 | 11482 |
| 12 | 8011 | 8507 | 9003 | 9499 | 9995 | 10491 | 10987 | 11483 |
| 13 | 8012 | 8508 | 9004 | 9500 | 9996 | 10492 | 10988 | 11484 |
| 14 | 8013 | 8509 | 9005 | 9501 | 9997 | 10493 | 10989 | 11485 |
| 15 | 8014 | 8510 | 9006 | 9502 | 9998 | 10494 | 10990 | 11486 |
| 16 | 8015 | 8511 | 9007 | 9503 | 9999 | 10495 | 10991 | 11487 |
| 17 | 8016 | 8512 | 9008 | 9504 | 10000 | 10496 | 10992 | 11488 |
| 18 | 8017 | 8513 | 9009 | 9505 | 10001 | 10497 | 10993 | 11489 |
| 19 | 8018 | 8514 | 9010 | 9506 | 10002 | 10498 | 10994 | 11490 |
| 20 | 8019 | 8515 | 9011 | 9507 | 10003 | 10499 | 10995 | 11491 |
| 21 | 8020 | 8516 | 9012 | 9508 | 10004 | 10500 | 10996 | 11492 |
| 22 | 8021 | 8517 | 9013 | 9509 | 10005 | 10501 | 10997 | 11493 |
| 23 | 8022 | 8518 | 9014 | 9510 | 10006 | 10502 | 10998 | 11494 |
| 24 | 8023 | 8519 | 9015 | 9511 | 10007 | 10503 | 10999 | 11495 |
| 25 | 8024 | 8520 | 9016 | 9512 | 10008 | 10504 | 11000 | 11496 |
| 26 | 8025 | 8521 | 9017 | 9513 | 10009 | 10505 | 11001 | 11497 |
| 27 | 8026 | 8522 | 9018 | 9514 | 10010 | 10506 | 11002 | 11498 |
| 28 | 8027 | 8523 | 9019 | 9515 | 10011 | 10507 | 11003 | 11499 |
| 29 | 8028 | 8524 | 9020 | 9516 | 10012 | 10508 | 11004 | 11500 |
| 30 | 8029 | 8525 | 9021 | 9517 | 10013 | 10509 | 11005 | 11501 |
| 31 | 8030 | 8526 | 9022 | 9518 | 10014 | 10510 | 11006 | 11502 |
| 32 | 8031 | 8527 | 9023 | 9519 | 10015 | 10511 | 11007 | 11503 |
| 33 | 8032 | 8528 | 9024 | 9520 | 10016 | 10512 | 11008 | 11504 |
| 34 | 8033 | 8529 | 9025 | 9521 | 10017 | 10513 | 11009 | 11505 |
| 35 | 8034 | 8530 | 9026 | 9522 | 10018 | 10514 | 11010 | 11506 |
| 36 | 8035 | 8531 | 9027 | 9523 | 10019 | 10515 | 11011 | 11507 |
| 37 | 8036 | 8532 | 9028 | 9524 | 10020 | 10516 | 11012 | 11508 |
| 38 | 8037 | 8533 | 9029 | 9525 | 10021 | 10517 | 11013 | 11509 |
| 39 | 8038 | 8534 | 9030 | 9526 | 10022 | 10518 | 11014 | 11510 |
| 40 | 8039 | 8535 | 9031 | 9527 | 10023 | 10519 | 11015 | 11511 |
| 41 | 8040 | 8536 | 9032 | 9528 | 10024 | 10520 | 11016 | 11512 |
| 42 | 8041 | 8537 | 9033 | 9529 | 10025 | 10521 | 11017 | 11513 |
| 43 | 8042 | 8538 | 9034 | 9530 | 10026 | 10522 | 11018 | 11514 |
| 44 | 8043 | 8539 | 9035 | 9531 | 10027 | 10523 | 11019 | 11515 |
| 45 | 8044 | 8540 | 9036 | 9532 | 10028 | 10524 | 11020 | 11516 |
| 46 | 8045 | 8541 | 9037 | 9533 | 10029 | 10525 | 11021 | 11517 |
| 47 | 8046 | 8542 | 9038 | 9534 | 10030 | 10526 | 11022 | 11518 |
| 48 | 8047 | 8543 | 9039 | 9535 | 10031 | 10527 | 11023 | 11519 |
| 49 | 8048 | 8544 | 9040 | 9536 | 10032 | 10528 | 11024 | 11520 |
| 50 | 8049 | 8545 | 9041 | 9537 | 10033 | 10529 | 11025 | 11521 |
| 51 | 8050 | 8546 | 9042 | 9538 | 10034 | 10530 | 11026 | 11522 |
| 52 | 8051 | 8547 | 9043 | 9539 | 10035 | 10531 | 11027 | 11523 |
| 53 | 8052 | 8548 | 9044 | 9540 | 10036 | 10532 | 11028 | 11524 |
| 54 | 8053 | 8549 | 9045 | 9541 | 10037 | 10533 | 11029 | 11525 |
| 55 | 8054 | 8550 | 9046 | 9542 | 10038 | 10534 | 11030 | 11526 |
| 56 | 8055 | 8551 | 9047 | 9543 | 10039 | 10535 | 11031 | 11527 |
| 57 | 8056 | 8552 | 9048 | 9544 | 10040 | 10536 | 11032 | 11528 |
| 58 | 8057 | 8553 | 9049 | 9545 | 10041 | 10537 | 11033 | 11529 |
| 59 | 8058 | 8554 | 9050 | 9546 | 10042 | 10538 | 11034 | 11530 |
| 60 | 8059 | 8555 | 9051 | 9547 | 10043 | 10539 | 11035 | 11531 |
| 61 | 8060 | 8556 | 9052 | 9548 | 10044 | 10540 | 11036 | 11532 |
| 62 | 8061 | 8557 | 9053 | 9549 | 10045 | 10541 | 11037 | 11533 |
| 63 | 8062 | 8558 | 9054 | 9550 | 10046 | 10542 | 11038 | 11534 |
| 64 | 8063 | 8559 | 9055 | 9551 | 10047 | 10543 | 11039 | 11535 |
| 65 | 8064 | 8560 | 9056 | 9552 | 10048 | 10544 | 11040 | 11536 |
| 66 | 8065 | 8561 | 9057 | 9553 | 10049 | 10545 | 11041 | 11537 |
| 67 | 8066 | 8562 | 9058 | 9554 | 10050 | 10546 | 11042 | 11538 |
| 68 | 8067 | 8563 | 9059 | 9555 | 10051 | 10547 | 11043 | 11539 |
| 69 | 8068 | 8564 | 9060 | 9556 | 10052 | 10548 | 11044 | 11540 |
| 70 | 8069 | 8565 | 9061 | 9557 | 10053 | 10549 | 11045 | 11541 |
| 71 | 8070 | 8566 | 9062 | 9558 | 10054 | 10550 | 11046 | 11542 |
| 72 | 8071 | 8567 | 9063 | 9559 | 10055 | 10551 | 11047 | 11543 |
| 73 | 8072 | 8568 | 9064 | 9560 | 10056 | 10552 | 11048 | 11544 |
| 74 | 8073 | 8569 | 9065 | 9561 | 10057 | 10553 | 11049 | 11545 |
| 75 | 8074 | 8570 | 9066 | 9562 | 10058 | 10554 | 11050 | 11546 |
| 76 | 8075 | 8571 | 9067 | 9563 | 10059 | 10555 | 11051 | 11547 |
| 77 | 8076 | 8572 | 9068 | 9564 | 10060 | 10556 | 11052 | 11548 |
| 78 | 8077 | 8573 | 9069 | 9565 | 10061 | 10557 | 11053 | 11549 |
| 79 | 8078 | 8574 | 9070 | 9566 | 10062 | 10558 | 11054 | 1550 |
| 80 | 8079 | 8575 | 9071 | 9567 | 10063 | 10559 | 11055 | 11551 |
| 81 | 8080 | 8576 | 9072 | 9568 | 10064 | 10560 | 11056 | 11552 |
| 82 | 8081 | 8577 | 9073 | 9569 | 10065 | 10561 | 11057 | 11553 |
| 83 | 8082 | 8578 | 9074 | 9570 | 10066 | 10562 | 11058 | 11554 |
| 84 | 8083 | 8579 | 9075 | 9571 | 10067 | 10563 | 11059 | 11555 |
| 85 | 8084 | 8580 | 9076 | 9572 | 10068 | 10564 | 11060 | 11556 |
| 86 | 8085 | 8581 | 9077 | 9573 | 10069 | 10565 | 11061 | 11557 |
| 87 | 8086 | 8582 | 9078 | 9574 | 10070 | 10566 | 11062 | 11558 |
| 88 | 8087 | 8583 | 9079 | 9575 | 10071 | 10567 | 11063 | 11559 |
| 89 | 8088 | 8584 | 9080 | 9576 | 10072 | 10568 | 11064 | 11560 |
| 90 | 8089 | 8585 | 9081 | 9577 | 10073 | 10569 | 11065 | 11561 |
| 91 | 8090 | 8586 | 9082 | 9578 | 10074 | 10570 | 11066 | 11562 |
| 92 | 8091 | 8587 | 9083 | 9579 | 10075 | 10571 | 11067 | 11563 |
| 93 | 8092 | 8588 | 9084 | 9580 | 10076 | 10572 | 11068 | 11564 |
| 94 | 8093 | 8589 | 9085 | 9581 | 10077 | 10573 | 11069 | 11565 |
| 95 | 8094 | 8590 | 9086 | 9582 | 10078 | 10574 | 11070 | 11566 |
| 96 | 8095 | 8591 | 9087 | 9583 | 10079 | 10575 | 11071 | 11567 |
| 97 | 8096 | 8592 | 9088 | 9584 | 10080 | 10576 | 11072 | 11568 |
| 98 | 8097 | 8593 | 9089 | 9585 | 10081 | 10577 | 11073 | 11569 |
| 99 | 8098 | 8594 | 9090 | 9586 | 10082 | 10578 | 11074 | 11570 |
| 100 | 8099 | 8595 | 9091 | 9587 | 10083 | 10579 | 11075 | 11571 |
| 101 | 8100 | 8596 | 9092 | 9588 | 10084 | 10580 | 11076 | 11572 |
| 102 | 8101 | 8597 | 9093 | 9589 | 10085 | 10581 | 11077 | 11573 |
| 103 | 8102 | 8598 | 9094 | 9590 | 10086 | 10582 | 11078 | 11574 |
| 104 | 8103 | 8599 | 9095 | 9591 | 10087 | 10583 | 11079 | 11575 |
| 105 | 8104 | 8600 | 9096 | 9592 | 10088 | 10584 | 11080 | 11576 |
| 106 | 8105 | 8601 | 9097 | 9593 | 10089 | 10585 | 11081 | 11577 |
| 107 | 8106 | 8602 | 9098 | 9594 | 10090 | 10586 | 11082 | 11578 |
| 108 | 8107 | 8603 | 9099 | 9595 | 10091 | 10587 | 11083 | 11579 |
| 109 | 8108 | 8604 | 9100 | 9596 | 10092 | 10588 | 1084 | 11580 |
| 110 | 8109 | 8605 | 9101 | 9597 | 10093 | 10589 | 11085 | 11581 |
| 111 | 8110 | 8606 | 9102 | 9598 | 10094 | 10590 | 11086 | 11582 |
| 112 | 8111 | 8607 | 9103 | 9599 | 10095 | 10591 | 11087 | 11583 |
| 113 | 8112 | 8608 | 9104 | 9600 | 10096 | 10592 | 11088 | 11584 |
| 114 | 8113 | 8609 | 9105 | 9601 | 10097 | 10593 | 11089 | 11585 |
| 115 | 8114 | 8610 | 9106 | 9602 | 10098 | 10594 | 11090 | 11586 |
| 116 | 8115 | 8611 | 9107 | 9603 | 10099 | 10595 | 11091 | 11587 |
| 117 | 8116 | 8612 | 9108 | 9604 | 10100 | 10596 | 11092 | 11588 |
| 118 | 8117 | 8613 | 9109 | 9605 | 10101 | 10597 | 11093 | 11589 |
| 119 | 8118 | 8614 | 9110 | 9606 | 10102 | 10598 | 11094 | 11590 |
| 120 | 8119 | 8615 | 9111 | 9607 | 10103 | 10599 | 11095 | 11591 |
| 121 | 8120 | 8616 | 9112 | 9608 | 10104 | 10600 | 11096 | 11592 |
| 122 | 8121 | 8617 | 9113 | 9609 | 10105 | 10601 | 11097 | 11593 |
| 123 | 8122 | 8618 | 9114 | 9610 | 10106 | 10602 | 11098 | 11594 |
| 124 | 8123 | 8619 | 9115 | 9611 | 10107 | 10603 | 11099 | 11595 |
| 125 | 8124 | 8620 | 9116 | 9612 | 10108 | 10604 | 11100 | 11596 |
| 126 | 8125 | 8621 | 9117 | 9613 | 10109 | 10605 | 11101 | 11597 |
| 127 | 8126 | 8622 | 9118 | 9614 | 10110 | 10606 | 11102 | 11598 |
| 128 | 8127 | 8623 | 9119 | 9615 | 10111 | 10607 | 11103 | 11599 |
| 129 | 8128 | 8624 | 9120 | 9616 | 10112 | 10608 | 11104 | 11600 |
| 130 | 8129 | 8625 | 9121 | 9617 | 10113 | 10609 | 11105 | 11601 |
| 131 | 8130 | 8626 | 9122 | 9618 | 10114 | 10610 | 11106 | 11602 |
| 132 | 8131 | 8627 | 9123 | 9619 | 10115 | 10611 | 11107 | 11603 |
| 133 | 8132 | 8628 | 9124 | 9620 | 10116 | 10612 | 11108 | 11604 |
| 134 | 8133 | 8629 | 9125 | 9621 | 10117 | 10613 | 11109 | 11605 |
| 135 | 8134 | 8630 | 9126 | 9622 | 10118 | 10614 | 11110 | 11606 |
| 136 | 8135 | 8631 | 9127 | 9623 | 10119 | 10615 | 11111 | 11607 |
| 137 | 8136 | 8632 | 9128 | 9624 | 10120 | 10616 | 11112 | 11608 |
| 138 | 8137 | 8633 | 9129 | 9625 | 10121 | 10617 | 11113 | 11609 |
| 139 | 8138 | 8634 | 9130 | 9626 | 10122 | 10618 | 11114 | 11610 |
| 140 | 8139 | 8635 | 9131 | 9627 | 10123 | 10619 | 11115 | 11611 |
| 141 | 8140 | 8636 | 9132 | 9628 | 10124 | 10620 | 11116 | 11612 |
| 142 | 8141 | 8637 | 9133 | 9629 | 10125 | 10621 | 11117 | 11613 |
| 143 | 8142 | 8638 | 9134 | 9630 | 10126 | 10622 | 11118 | 11614 |
| 144 | 8143 | 8639 | 9135 | 9631 | 10127 | 10623 | 11119 | 11615 |
| 145 | 8144 | 8640 | 9136 | 9632 | 10128 | 10624 | 11120 | 11616 |
| 146 | 8145 | 8641 | 9137 | 9633 | 10129 | 10625 | 11121 | 11617 |
| 147 | 8146 | 8642 | 9138 | 9634 | 10130 | 10626 | 11122 | 11618 |
| 148 | 8147 | 8643 | 9139 | 9635 | 10131 | 10627 | 11123 | 11619 |
| 149 | 8148 | 8644 | 9140 | 9636 | 10132 | 10628 | 11124 | 11620 |
| 150 | 8149 | 8645 | 9141 | 9637 | 10133 | 10629 | 11125 | 11621 |
| 151 | 8150 | 8646 | 9142 | 9638 | 10134 | 10630 | 11126 | 11622 |
| 152 | 8151 | 8647 | 9143 | 9639 | 10135 | 10631 | 11127 | 11623 |
| 153 | 8152 | 8648 | 9144 | 9640 | 10136 | 10632 | 11128 | 11624 |
| 154 | 8153 | 8649 | 9145 | 9641 | 10137 | 10633 | 11129 | 11625 |
| 155 | 8154 | 8650 | 9146 | 9642 | 10138 | 10634 | 11130 | 11626 |
| 156 | 8155 | 8651 | 9147 | 9643 | 10139 | 10635 | 11131 | 11627 |
| 157 | 8156 | 8652 | 9148 | 9644 | 10140 | 10636 | 11132 | 11628 |
| 158 | 8157 | 8653 | 9149 | 9645 | 10141 | 10637 | 11133 | 11629 |
| 159 | 8158 | 8654 | 9150 | 9646 | 10142 | 10638 | 11134 | 11630 |
| 160 | 8159 | 8655 | 9151 | 9647 | 10143 | 10639 | 11135 | 11631 |
| 161 | 8160 | 8656 | 9152 | 9648 | 10144 | 10640 | 11136 | 11632 |
| 162 | 8161 | 8657 | 9153 | 9649 | 10145 | 10641 | 11137 | 11633 |
| 163 | 8162 | 8658 | 9154 | 9650 | 10146 | 10642 | 11138 | 11634 |
| 164 | 8163 | 8659 | 9155 | 9651 | 10147 | 10643 | 11139 | 11635 |
| 165 | 8164 | 8660 | 9156 | 9652 | 10148 | 10644 | 11140 | 11636 |
| 166 | 8165 | 8661 | 9157 | 9653 | 10149 | 10645 | 11141 | 11637 |
| 167 | 8166 | 8662 | 9158 | 9654 | 10150 | 10646 | 11142 | 11638 |
| 168 | 8167 | 8663 | 9159 | 9655 | 10151 | 10647 | 11143 | 11639 |
| 169 | 8168 | 8664 | 9160 | 9656 | 10152 | 10648 | 11144 | 11640 |
| 170 | 8169 | 8665 | 9161 | 9657 | 10153 | 10649 | 11145 | 11641 |
| 171 | 8170 | 8666 | 9162 | 9658 | 10154 | 10650 | 11146 | 11642 |
| 172 | 8171 | 8667 | 9163 | 9659 | 10155 | 10651 | 11147 | 11643 |
| 173 | 8172 | 8668 | 9164 | 9660 | 10156 | 10652 | 11148 | 11644 |
| 174 | 8173 | 8669 | 9165 | 9661 | 10157 | 10653 | 11149 | 11645 |
| 175 | 8174 | 8670 | 9166 | 9662 | 10158 | 10654 | 11150 | 11646 |
| 176 | 8175 | 8671 | 9167 | 9663 | 10159 | 10655 | 11151 | 11647 |
| 177 | 8176 | 8672 | 9168 | 9664 | 10160 | 10656 | 11152 | 11648 |
| 178 | 8177 | 8673 | 9169 | 9665 | 10161 | 10657 | 11153 | 11649 |
| 179 | 8178 | 8674 | 9170 | 9666 | 10162 | 10658 | 11154 | 11650 |
| 180 | 8179 | 8675 | 9171 | 9667 | 10163 | 10659 | 11155 | 11651 |
| 181 | 8180 | 8676 | 9172 | 9668 | 10164 | 10660 | 11156 | 11652 |
| 182 | 8181 | 8677 | 9173 | 9669 | 10165 | 10661 | 11157 | 11653 |
| 183 | 8182 | 8678 | 9174 | 9670 | 10166 | 10662 | 11158 | 11654 |
| 184 | 8183 | 8679 | 9175 | 9671 | 10167 | 10663 | 11159 | 11655 |
| 185 | 8184 | 8680 | 9176 | 9672 | 10168 | 10664 | 11160 | 11656 |
| 186 | 8185 | 8681 | 9177 | 9673 | 10169 | 10665 | 11161 | 11657 |
| 187 | 8186 | 8682 | 9178 | 9674 | 10170 | 10666 | 11162 | 11658 |
| 188 | 8187 | 8683 | 9179 | 9675 | 10171 | 10667 | 11163 | 11659 |
| 189 | 8188 | 8684 | 9180 | 9676 | 10172 | 10668 | 11164 | 11660 |
| 190 | 8189 | 8685 | 9181 | 9677 | 10173 | 10669 | 11165 | 11661 |
| 191 | 8190 | 8686 | 9182 | 9678 | 10174 | 10670 | 11166 | 11662 |
| 192 | 8191 | 8687 | 9183 | 9679 | 10175 | 10671 | 11167 | 11663 |
| 193 | 8192 | 8688 | 9184 | 9680 | 10176 | 10672 | 11168 | 11664 |
| 194 | 8193 | 8689 | 9185 | 9681 | 10177 | 10673 | 11169 | 11665 |
| 195 | 8194 | 8690 | 9186 | 9682 | 10178 | 10674 | 11170 | 11666 |
| 196 | 8195 | 8691 | 9187 | 9683 | 10179 | 10675 | 11171 | 11667 |
| 197 | 8196 | 8692 | 9188 | 9684 | 10180 | 10676 | 11172 | 11668 |
| 198 | 8197 | 8693 | 9189 | 9685 | 10181 | 10677 | 11173 | 11669 |
| 199 | 8198 | 8694 | 9190 | 9686 | 10182 | 10678 | 11174 | 11670 |
| 200 | 8199 | 8695 | 9191 | 9687 | 10183 | 10679 | 11175 | 11671 |
| 201 | 8200 | 8696 | 9192 | 9688 | 10184 | 10680 | 11176 | 11672 |
| 202 | 8201 | 8697 | 9193 | 9689 | 10185 | 10681 | 11177 | 11673 |
| 203 | 8202 | 8698 | 9194 | 9690 | 10186 | 10682 | 11178 | 11674 |
| 204 | 8203 | 8699 | 9195 | 9691 | 10187 | 10683 | 11179 | 11675 |
| 205 | 8204 | 8700 | 9196 | 9692 | 10188 | 10684 | 11180 | 11676 |
| 206 | 8205 | 8701 | 9197 | 9693 | 10189 | 10685 | 11181 | 11677 |
| 207 | 8206 | 8702 | 9198 | 9694 | 10190 | 10686 | 11182 | 11678 |
| 208 | 8207 | 8703 | 9199 | 9695 | 10191 | 10687 | 11183 | 11679 |
| 209 | 8208 | 8704 | 9200 | 9696 | 10192 | 10688 | 11184 | 11680 |
| 210 | 8209 | 8705 | 9201 | 9697 | 10193 | 10689 | 11185 | 11681 |
| 211 | 8210 | 8706 | 9202 | 9698 | 10194 | 10690 | 11186 | 11682 |
| 212 | 8211 | 8707 | 9203 | 9699 | 10195 | 10691 | 11187 | 11683 |
| 213 | 8212 | 8708 | 9204 | 9700 | 10196 | 10692 | 11188 | 11684 |
| 214 | 8213 | 8709 | 9205 | 9701 | 10197 | 10693 | 11189 | 11685 |
| 215 | 8214 | 8710 | 9206 | 9702 | 10198 | 10694 | 11190 | 11686 |
| 216 | 8215 | 8711 | 9207 | 9703 | 10199 | 10695 | 11191 | 11687 |
| 217 | 8216 | 8712 | 9208 | 9704 | 10200 | 10696 | 11192 | 11688 |
| 218 | 8217 | 8713 | 9209 | 9705 | 10201 | 10697 | 11193 | 11689 |
| 219 | 8218 | 8714 | 9210 | 9706 | 10202 | 10698 | 11194 | 11690 |
| 220 | 8219 | 8715 | 9211 | 9707 | 10203 | 10699 | 11195 | 11691 |
| 221 | 8220 | 8716 | 9212 | 9708 | 10204 | 10700 | 11196 | 11692 |
| 222 | 8221 | 8717 | 9213 | 9709 | 10205 | 10701 | 11197 | 11693 |
| 223 | 8222 | 8718 | 9214 | 9710 | 10206 | 10702 | 11198 | 11694 |
| 224 | 8223 | 8719 | 9215 | 9711 | 10207 | 10703 | 11199 | 11695 |
| 225 | 8224 | 8720 | 9216 | 9712 | 10208 | 10704 | 11200 | 11696 |
| 226 | 8225 | 8721 | 9217 | 9713 | 10209 | 10705 | 11201 | 11697 |
| 227 | 8226 | 8722 | 9218 | 9714 | 10210 | 10706 | 11202 | 11698 |
| 228 | 8227 | 8723 | 9219 | 9715 | 10211 | 10707 | 11203 | 11699 |
| 229 | 8228 | 8724 | 9220 | 9716 | 10212 | 10708 | 11204 | 11700 |
| 230 | 8229 | 8725 | 9221 | 9717 | 10213 | 10709 | 11205 | 11701 |
| 231 | 8230 | 8726 | 9222 | 9718 | 10214 | 10710 | 1120€ | 11702 |
| 232 | 8231 | 8727 | 9223 | 9719 | 10215 | 10711 | 11207 | 11703 |
| 233 | 8232 | 8728 | 9224 | 9720 | 10216 | 10712 | 11208 | 11704 |
| 234 | 8233 | 8729 | 9225 | 9721 | 10217 | 10713 | 11209 | 11705 |
| 235 | 8234 | 8730 | 9226 | 9722 | 10218 | 10714 | 11210 | 11706 |
| 236 | 8235 | 8731 | 9227 | 9723 | 10219 | 10715 | 11211 | 11707 |
| 237 | 8236 | 8732 | 9228 | 9724 | 10220 | 10716 | 11212 | 11708 |
| 238 | 8237 | 8733 | 9229 | 9725 | 10221 | 10717 | 11213 | 11709 |
| 239 | 8238 | 8734 | 9230 | 9726 | 10222 | 10718 | 11214 | 11710 |
| 240 | 8239 | 8735 | 9231 | 9727 | 10223 | 10719 | 11215 | 11711 |
| 241 | 8240 | 8736 | 9232 | 9728 | 10224 | 10720 | 11216 | 11712 |
| 242 | 8241 | 8737 | 9233 | 9729 | 10225 | 10721 | 11217 | 11713 |
| 243 | 8242 | 8738 | 9234 | 9730 | 10226 | 10722 | 11218 | 11714 |
| 244 | 8243 | 8739 | 9235 | 9731 | 10227 | 10723 | 11219 | 11715 |
| 245 | 8244 | 8740 | 9236 | 9732 | 10228 | 10724 | 11220 | 11716 |
| 246 | 8245 | 8741 | 9237 | 9733 | 10229 | 10725 | 11221 | 11717 |
| 247 | 8246 | 8742 | 9238 | 9734 | 10230 | 10726 | 11222 | 11718 |
| 248 | 8247 | 8743 | 9239 | 9735 | 10231 | 10727 | 11223 | 11719 |
| 249 | 8248 | 8744 | 9240 | 9736 | 10232 | 10728 | 11224 | 11720 |
| 250 | 8249 | 8745 | 9241 | 9737 | 10233 | 10729 | 11225 | 11721 |
| 251 | 8250 | 8746 | 9242 | 9738 | 10234 | 10730 | 11226 | 11722 |
| 252 | 8251 | 8747 | 9243 | 9739 | 10235 | 10731 | 11227 | 11723 |
| 253 | 8252 | 8748 | 9244 | 9740 | 10236 | 10732 | 11228 | 11724 |
| 254 | 8253 | 8749 | 9245 | 9741 | 10237 | 10733 | 11229 | 11725 |
| 255 | 8254 | 8750 | 9246 | 9742 | 10238 | 10734 | 11230 | 11726 |
| 256 | 8255 | 8751 | 9247 | 9743 | 10239 | 10735 | 11231 | 11727 |
| 257 | 8256 | 8752 | 9248 | 9744 | 10240 | 10736 | 11232 | 11728 |
| 258 | 8257 | 8753 | 9249 | 9745 | 10241 | 10737 | 11233 | 11729 |
| 259 | 8258 | 8754 | 9250 | 9746 | 10242 | 10738 | 11234 | 11730 |
| 260 | 8259 | 8755 | 9251 | 9747 | 10243 | 10739 | 11235 | 11731 |
| 261 | 8260 | 8756 | 9252 | 9748 | 10244 | 10740 | 11236 | 11732 |
| 262 | 8261 | 8757 | 9253 | 9749 | 10245 | 10741 | 11237 | 11733 |
| 263 | 8262 | 8758 | 9254 | 9750 | 10246 | 10742 | 11238 | 11734 |
| 264 | 8263 | 8759 | 9255 | 9751 | 10247 | 10743 | 11239 | 11735 |
| 265 | 8264 | 8760 | 9256 | 9752 | 10248 | 10744 | 11240 | 11736 |
| 266 | 8265 | 8761 | 9257 | 9753 | 10249 | 10745 | 11241 | 11737 |
| 267 | 8266 | 8762 | 9258 | 9754 | 10250 | 10746 | 11242 | 11738 |
| 268 | 8267 | 8763 | 9259 | 9755 | 10251 | 10747 | 11243 | 11739 |
| 269 | 8268 | 8764 | 9260 | 9756 | 10252 | 10748 | 11244 | 11740 |
| 270 | 8269 | 8765 | 9261 | 9757 | 10253 | 10749 | 11245 | 11741 |
| 271 | 8270 | 8766 | 9262 | 9758 | 10254 | 10750 | 11246 | 11742 |
| 272 | 8271 | 8767 | 9263 | 9759 | 10255 | 10751 | 11247 | 11743 |
| 273 | 8272 | 8768 | 9264 | 9760 | 10256 | 10752 | 11248 | 11744 |
| 274 | 8273 | 8769 | 9265 | 9761 | 10257 | 10753 | 11249 | 11745 |
| 275 | 8274 | 8770 | 9266 | 9762 | 10258 | 10754 | 11250 | 11746 |
| 276 | 8275 | 8771 | 9267 | 9763 | 10259 | 10755 | 11251 | 11747 |
| 277 | 8276 | 8772 | 9268 | 9764 | 10260 | 10756 | 11252 | 11748 |
| 278 | 8277 | 8773 | 9269 | 9765 | 10261 | 10757 | 11253 | 11749 |
| 279 | 8278 | 8774 | 9270 | 9766 | 10262 | 10758 | 11254 | 11750 |
| 280 | 8279 | 8775 | 9271 | 9767 | 10263 | 10759 | 11255 | 11751 |
| 281 | 8280 | 8776 | 9272 | 9768 | 10264 | 10760 | 11256 | 11752 |
| 282 | 8281 | 8777 | 9273 | 9769 | 10265 | 10761 | 11257 | 11753 |
| 283 | 8282 | 8778 | 9274 | 9770 | 10266 | 10762 | 11258 | 11754 |
| 284 | 8283 | 8779 | 9275 | 9771 | 10267 | 10763 | 11259 | 11755 |
| 285 | 8284 | 8780 | 9276 | 9772 | 10268 | 10764 | 11260 | 11756 |
| 286 | 8285 | 8781 | 9277 | 9773 | 10269 | 10765 | 11261 | 11757 |
| 287 | 8286 | 8782 | 9278 | 9774 | 10270 | 10766 | 11262 | 11758 |
| 288 | 8287 | 8783 | 9279 | 9775 | 10271 | 10767 | 11263 | 11759 |
| 289 | 8288 | 8784 | 9280 | 9776 | 10272 | 10768 | 11264 | 11760 |
| 290 | 8289 | 8785 | 9281 | 9777 | 10273 | 10769 | 11265 | 11761 |
| 291 | 8290 | 8786 | 9282 | 9778 | 10274 | 10770 | 11266 | 11762 |
| 292 | 8291 | 8787 | 9283 | 9779 | 10275 | 10771 | 11267 | 11763 |
| 293 | 8292 | 8788 | 9284 | 9780 | 10276 | 10772 | 11268 | 11764 |
| 294 | 8293 | 8789 | 9285 | 9781 | 10277 | 10773 | 11269 | 11765 |
| 295 | 8294 | 8790 | 9286 | 9782 | 10278 | 10774 | 11270 | 11766 |
| 296 | 8295 | 8791 | 9287 | 9783 | 10279 | 10775 | 11271 | 1176 |
| 297 | 8296 | 8792 | 9288 | 9784 | 10280 | 10776 | 11272 | 11768 |
| 298 | 8297 | 8793 | 9289 | 9785 | 10281 | 10777 | 11273 | 11769 |
| 299 | 8298 | 8794 | 9290 | 9786 | 10282 | 10778 | 11274 | 11770 |
| 300 | 8299 | 8795 | 9291 | 9787 | 10283 | 10779 | 11275 | 11771 |
| 301 | 8300 | 8796 | 9292 | 9788 | 10284 | 10780 | 11276 | 11772 |
| 302 | 8301 | 8797 | 9293 | 9789 | 10285 | 10781 | 11277 | 11773 |
| 303 | 8302 | 8798 | 9294 | 9790 | 10286 | 10782 | 11278 | 11774 |
| 304 | 8303 | 8799 | 9295 | 9791 | 10287 | 10783 | 11279 | 11775 |
| 305 | 8304 | 8800 | 9296 | 9792 | 10288 | 10784 | 11280 | 11776 |
| 306 | 8305 | 8801 | 9297 | 9793 | 10289 | 10785 | 11281 | 11777 |
| 307 | 8306 | 8802 | 9298 | 9794 | 10290 | 10786 | 11282 | 11778 |
| 308 | 8307 | 8803 | 9299 | 9795 | 10291 | 10787 | 11283 | 11779 |
| 309 | 8308 | 8804 | 9300 | 9796 | 10292 | 10788 | 11284 | 11780 |
| 310 | 8309 | 8805 | 9301 | 9797 | 10293 | 10789 | 11285 | 11781 |
| 311 | 8310 | 8806 | 9302 | 9798 | 10294 | 10790 | 11286 | 11782 |
| 312 | 8311 | 8807 | 9303 | 9799 | 10295 | 10791 | 11287 | 11783 |
| 313 | 8312 | 8808 | 9304 | 9800 | 10296 | 10792 | 11288 | 11784 |
| 314 | 8313 | 8809 | 9305 | 9801 | 10297 | 10793 | 11289 | 11785 |
| 315 | 8314 | 8810 | 9306 | 9802 | 10298 | 10794 | 11290 | 11786 |
| 316 | 8315 | 8811 | 9307 | 9803 | 10299 | 10795 | 11291 | 11787 |
| 317 | 8316 | 8812 | 9308 | 9804 | 10300 | 10796 | 11292 | 11788 |
| 318 | 8317 | 8813 | 9309 | 9805 | 10301 | 10797 | 11293 | 11789 |
| 319 | 8318 | 8814 | 9310 | 9806 | 10302 | 10798 | 11294 | 11790 |
| 320 | 8319 | 8815 | 9311 | 9807 | 10303 | 10799 | 11295 | 11791 |
| 321 | 8320 | 8816 | 9312 | 9808 | 10304 | 10800 | 11296 | 11792 |
| 322 | 8321 | 8817 | 9313 | 9809 | 10305 | 10801 | 11297 | 11793 |
| 323 | 8322 | 8818 | 9314 | 9810 | 10306 | 10802 | 11298 | 11794 |
| 324 | 8323 | 8819 | 9315 | 9811 | 10307 | 10803 | 11299 | 11795 |
| 325 | 8324 | 8820 | 9316 | 9812 | 10308 | 10804 | 11300 | 11796 |
| 326 | 8325 | 8821 | 9317 | 9813 | 10309 | 10805 | 11301 | 11797 |
| 327 | 8326 | 8822 | 9318 | 9814 | 10310 | 10806 | 11302 | 11798 |
| 328 | 8327 | 8823 | 9319 | 9815 | 10311 | 10807 | 11303 | 11799 |
| 329 | 8328 | 8824 | 9320 | 9816 | 10312 | 10808 | 11304 | 11800 |
| 330 | 8329 | 8825 | 9321 | 9817 | 10313 | 10809 | 11305 | 11801 |
| 331 | 8330 | 8826 | 9322 | 9818 | 10314 | 10810 | 11306 | 11802 |
| 332 | 8331 | 8827 | 9323 | 9819 | 10315 | 10811 | 11307 | 11803 |
| 333 | 8332 | 8828 | 9324 | 9820 | 10316 | 10812 | 11308 | 11804 |
| 334 | 8333 | 8829 | 9325 | 9821 | 10317 | 10813 | 11309 | 11805 |
| 335 | 8334 | 8830 | 9326 | 9822 | 10318 | 10814 | 11310 | 11806 |
| 336 | 8335 | 8831 | 9327 | 9823 | 10319 | 10815 | 11311 | 11807 |
| 337 | 8336 | 8832 | 9328 | 9824 | 10320 | 10816 | 11312 | 11808 |
| 338 | 8337 | 8833 | 9329 | 9825 | 10321 | 10817 | 11313 | 11809 |
| 339 | 8338 | 8834 | 9330 | 9826 | 10322 | 10818 | 11314 | 11810 |
| 340 | 8339 | 8835 | 9331 | 9827 | 10323 | 10819 | 11315 | 11811 |
| 341 | 8340 | 8836 | 9332 | 9828 | 10324 | 10820 | 11316 | 11812 |
| 342 | 8341 | 8837 | 9333 | 9829 | 10325 | 10821 | 11317 | 11813 |
| 343 | 8342 | 8838 | 9334 | 9830 | 10326 | 10822 | 11318 | 11814 |
| 344 | 8343 | 8839 | 9335 | 9831 | 10327 | 10823 | 11319 | 11815 |
| 345 | 8344 | 8840 | 9336 | 9832 | 10328 | 10824 | 11320 | 11816 |
| 346 | 8345 | 8841 | 9337 | 9833 | 10329 | 10825 | 11321 | 11817 |
| 347 | 8346 | 8842 | 9338 | 9834 | 10330 | 10826 | 11322 | 11818 |
| 348 | 8347 | 8843 | 9339 | 9835 | 10331 | 10827 | 11323 | 11819 |
| 349 | 8348 | 8844 | 9340 | 9836 | 10332 | 10828 | 11324 | 11820 |
| 350 | 8349 | 8845 | 9341 | 9837 | 10333 | 10829 | 11325 | 11821 |
| 351 | 8350 | 8846 | 9342 | 9838 | 10334 | 10830 | 11326 | 11822 |
| 352 | 8351 | 8847 | 9343 | 9839 | 10335 | 10831 | 11327 | 11823 |
| 353 | 8352 | 8848 | 9344 | 9840 | 10336 | 10832 | 11328 | 11824 |
| 354 | 8353 | 8849 | 9345 | 9841 | 10337 | 10833 | 11329 | 11825 |
| 355 | 8354 | 8850 | 9346 | 9842 | 10338 | 10834 | 11330 | 11826 |
| 356 | 8355 | 8851 | 9347 | 9843 | 10339 | 10835 | 11331 | 11827 |
| 357 | 8356 | 8852 | 9348 | 9844 | 10340 | 10836 | 11332 | 11828 |
| 358 | 8357 | 8853 | 9349 | 9845 | 10341 | 10837 | 11333 | 11829 |
| 359 | 8358 | 8854 | 9350 | 9846 | 10342 | 10838 | 11334 | 11830 |
| 360 | 8359 | 8855 | 9351 | 9847 | 10343 | 10839 | 11335 | 11831 |
| 361 | 8360 | 8856 | 9352 | 9848 | 10344 | 10840 | 11336 | 11832 |
| 362 | 8361 | 8857 | 9353 | 9849 | 10345 | 10841 | 11337 | 11833 |
| 363 | 8362 | 8858 | 9354 | 9850 | 10346 | 10842 | 11338 | 11834 |
| 364 | 8363 | 8859 | 9355 | 9851 | 10347 | 10843 | 11339 | 11835 |
| 365 | 8364 | 8860 | 9356 | 9852 | 10348 | 10844 | 11340 | 11836 |
| 366 | 8365 | 8861 | 9357 | 9853 | 10349 | 10845 | 11341 | 11837 |
| 367 | 8366 | 8862 | 9358 | 9854 | 10350 | 10846 | 11342 | 11838 |
| 368 | 8367 | 8863 | 9359 | 9855 | 10351 | 10847 | 11343 | 11839 |
| 369 | 8368 | 8864 | 9360 | 9856 | 10352 | 10848 | 11344 | 11840 |
| 370 | 8369 | 8865 | 9361 | 9857 | 10353 | 10849 | 11345 | 11841 |
| 371 | 8370 | 8866 | 9362 | 9858 | 10354 | 10850 | 11346 | 11842 |
| 372 | 8371 | 8867 | 9363 | 9859 | 10355 | 10851 | 11347 | 11843 |
| 373 | 8372 | 8868 | 9364 | 9860 | 10356 | 10852 | 11348 | 11844 |
| 374 | 8373 | 8869 | 9365 | 9861 | 10357 | 10853 | 11349 | 11845 |
| 375 | 8374 | 8870 | 9366 | 9862 | 10358 | 10854 | 11350 | 11846 |
| 376 | 8375 | 8871 | 9367 | 9863 | 10359 | 10855 | 11351 | 11847 |
| 377 | 8376 | 8872 | 9368 | 9864 | 10360 | 10856 | 11352 | 11848 |
| 378 | 8377 | 8873 | 9369 | 9865 | 10361 | 10857 | 11353 | 11849 |
| 379 | 8378 | 8874 | 9370 | 9866 | 10362 | 10858 | 11354 | 11850 |
| 380 | 8379 | 8875 | 9371 | 9867 | 10363 | 10859 | 11355 | 11851 |
| 381 | 8380 | 8876 | 9372 | 9868 | 10364 | 10860 | 11356 | 11852 |
| 382 | 8381 | 8877 | 9373 | 9869 | 10365 | 10861 | 11357 | 11853 |
| 383 | 8382 | 8878 | 9374 | 9870 | 10366 | 10862 | 11358 | 11854 |
| 384 | 8383 | 8879 | 9375 | 9871 | 10367 | 10863 | 11359 | 11855 |
| 385 | 8384 | 8880 | 9376 | 9872 | 10368 | 10864 | 11360 | 11856 |
| 386 | 8385 | 8881 | 9377 | 9873 | 10369 | 10865 | 11361 | 11857 |
| 387 | 8386 | 8882 | 9378 | 9874 | 10370 | 10866 | 11362 | 11858 |
| 388 | 8387 | 8883 | 9379 | 9875 | 10371 | 10867 | 11363 | 11859 |
| 389 | 8388 | 8884 | 9380 | 9876 | 10372 | 10868 | 11364 | 11860 |
| 390 | 8389 | 8885 | 9381 | 9877 | 10373 | 10869 | 11365 | 11861 |
| 391 | 8390 | 8886 | 9382 | 9878 | 10374 | 10870 | 11366 | 11862 |
| 392 | 8391 | 8887 | 9383 | 9879 | 10375 | 10871 | 11367 | 11863 |
| 393 | 8392 | 8888 | 9384 | 9880 | 10376 | 10872 | 11368 | 11864 |
| 394 | 8393 | 8889 | 9385 | 9881 | 10377 | 10873 | 11369 | 11865 |
| 395 | 8394 | 8890 | 9386 | 9882 | 10378 | 10874 | 11370 | 11866 |
| 396 | 8395 | 8891 | 9387 | 9883 | 10379 | 10875 | 11371 | 11867 |
| 397 | 8396 | 8892 | 9388 | 9884 | 10380 | 10876 | 11372 | 11868 |
| 398 | 8397 | 8893 | 9389 | 9885 | 10381 | 10877 | 11373 | 11869 |
| 399 | 8398 | 8894 | 9390 | 9886 | 10382 | 10878 | 11374 | 11870 |
| 400 | 8399 | 8895 | 9391 | 9887 | 10383 | 10879 | 11375 | 11871 |
| 401 | 8400 | 8896 | 9392 | 9888 | 10384 | 10880 | 11376 | 11872 |
| 402 | 8401 | 8897 | 9393 | 9889 | 10385 | 10881 | 11377 | 11873 |
| 403 | 8402 | 8898 | 9394 | 9890 | 10386 | 10882 | 11378 | 11874 |
| 404 | 8403 | 8899 | 9395 | 9891 | 10387 | 10883 | 11379 | 11875 |
| 405 | 8404 | 8900 | 9396 | 9892 | 10388 | 10884 | 11380 | 11876 |
| 406 | 8405 | 8901 | 9397 | 9893 | 10389 | 10885 | 11381 | 11877 |
| 407 | 8406 | 8902 | 9398 | 9894 | 10390 | 10886 | 11382 | 11878 |
| 408 | 8407 | 8903 | 9399 | 9895 | 10391 | 10887 | 11383 | 11879 |
| 409 | 8408 | 8904 | 9400 | 9896 | 10392 | 10888 | 11384 | 11880 |
| 410 | 8409 | 8905 | 9401 | 9897 | 10393 | 10889 | 11385 | 11881 |
| 411 | 8410 | 8906 | 9402 | 9898 | 10394 | 10890 | 11386 | 11882 |
| 412 | 8411 | 8907 | 9403 | 9899 | 10395 | 10891 | 11387 | 11883 |
| 413 | 8412 | 8908 | 9404 | 9900 | 10396 | 10892 | 11388 | 11884 |
| 414 | 8413 | 8909 | 9405 | 9901 | 10397 | 10893 | 11389 | 11885 |
| 415 | 8414 | 8910 | 9406 | 9902 | 10398 | 10894 | 11390 | 11886 |
| 416 | 8415 | 8911 | 9407 | 9903 | 10399 | 10895 | 11391 | 11887 |
| 417 | 8416 | 8912 | 9408 | 9904 | 10400 | 10896 | 11392 | 11888 |
| 418 | 8417 | 8913 | 9409 | 9905 | 10401 | 10897 | 11393 | 11889 |
| 419 | 8418 | 8914 | 9410 | 9906 | 10402 | 10898 | 11394 | 11890 |
| 420 | 8419 | 8915 | 9411 | 9907 | 10403 | 10899 | 11395 | 11891 |
| 421 | 8420 | 8916 | 9412 | 9908 | 10404 | 10900 | 11396 | 11892 |
| 422 | 8421 | 8917 | 9413 | 9909 | 10405 | 10901 | 11397 | 11893 |
| 423 | 8422 | 8918 | 9414 | 9910 | 10406 | 10902 | 11398 | 11894 |
| 424 | 8423 | 8919 | 9415 | 9911 | 10407 | 10903 | 11399 | 11895 |
| 425 | 8424 | 8920 | 9416 | 9912 | 10408 | 10904 | 11400 | 11896 |
| 426 | 8425 | 8921 | 9417 | 9913 | 10409 | 10905 | 11401 | 11897 |
| 427 | 8426 | 8922 | 9418 | 9914 | 10410 | 10906 | 11402 | 11898 |
| 428 | 8427 | 8923 | 9419 | 9915 | 10411 | 10907 | 11403 | 11899 |
| 429 | 8428 | 8924 | 9420 | 9916 | 10412 | 10908 | 11404 | 11900 |
| 430 | 8429 | 8925 | 9421 | 9917 | 10413 | 10909 | 11405 | 11901 |
| 431 | 8430 | 8926 | 9422 | 9918 | 10414 | 10910 | 11406 | 11902 |
| 432 | 8431 | 8927 | 9423 | 9919 | 10415 | 10911 | 11407 | 11903 |
| 433 | 8432 | 8928 | 9424 | 9920 | 10416 | 10912 | 11408 | 11904 |
| 434 | 8433 | 8929 | 9425 | 9921 | 10417 | 10913 | 11409 | 11905 |
| 435 | 8434 | 8930 | 9426 | 9922 | 10418 | 10914 | 11410 | 11906 |
| 436 | 8435 | 8931 | 9427 | 9923 | 10419 | 10915 | 11411 | 11907 |
| 437 | 8436 | 8932 | 9428 | 9924 | 10420 | 10916 | 11412 | 11908 |
| 438 | 8437 | 8933 | 9429 | 9925 | 10421 | 10917 | 11413 | 11909 |
| 439 | 8438 | 8934 | 9430 | 9926 | 10422 | 10918 | 11414 | 11910 |
| 440 | 8439 | 8935 | 9431 | 9927 | 10423 | 10919 | 11415 | 11911 |
| 441 | 8440 | 8936 | 9432 | 9928 | 10424 | 10920 | 11416 | 11912 |
| 442 | 8441 | 8937 | 9433 | 9929 | 10425 | 10921 | 11417 | 11913 |
| 443 | 8442 | 8938 | 9434 | 9930 | 10426 | 10922 | 11418 | 11914 |
| 444 | 8443 | 8939 | 9435 | 9931 | 10427 | 10923 | 11419 | 11915 |
| 445 | 8444 | 8940 | 9436 | 9932 | 10428 | 10924 | 11420 | 11916 |
| 446 | 8445 | 8941 | 9437 | 9933 | 10429 | 10925 | 11421 | 11917 |
| 447 | 8446 | 8942 | 9438 | 9934 | 10430 | 10926 | 11422 | 11918 |
| 448 | 8447 | 8943 | 9439 | 9935 | 10431 | 10927 | 11423 | 11919 |
| 449 | 8448 | 8944 | 9440 | 9936 | 10432 | 10928 | 11424 | 11920 |
| 450 | 8449 | 8945 | 9441 | 9937 | 10433 | 10929 | 11425 | 11921 |
| 451 | 8450 | 8946 | 9442 | 9938 | 10434 | 10930 | 11426 | 11922 |
| 452 | 8451 | 8947 | 9443 | 9939 | 10435 | 10931 | 11427 | 11923 |
| 453 | 8452 | 8948 | 9444 | 9940 | 10436 | 10932 | 11428 | 11924 |
| 454 | 8453 | 8949 | 9445 | 9941 | 10437 | 10933 | 11429 | 11925 |
| 455 | 8454 | 8950 | 9446 | 9942 | 10438 | 10934 | 11430 | 11926 |
| 456 | 8455 | 8951 | 9447 | 9943 | 10439 | 10935 | 11431 | 11927 |
| 457 | 8456 | 8952 | 9448 | 9944 | 10440 | 10936 | 11432 | 11928 |
| 458 | 8457 | 8953 | 9449 | 9945 | 10441 | 10937 | 11433 | 11929 |
| 459 | 8458 | 8954 | 9450 | 9946 | 10442 | 10938 | 11434 | 11930 |
| 460 | 8459 | 8955 | 9451 | 9947 | 10443 | 10939 | 11435 | 11931 |
| 461 | 8460 | 8956 | 9452 | 9948 | 10444 | 10940 | 11436 | 11932 |
| 462 | 8461 | 8957 | 9453 | 9949 | 10445 | 10941 | 11437 | 11933 |
| 463 | 8462 | 8958 | 9454 | 9950 | 10446 | 10942 | 11438 | 11934 |
| 464 | 8463 | 8959 | 9455 | 9951 | 10447 | 10943 | 11439 | 11935 |
| 465 | 8464 | 8960 | 9456 | 9952 | 10448 | 10944 | 11440 | 11936 |
| 466 | 8465 | 8961 | 9457 | 9953 | 10449 | 10945 | 11441 | 11937 |
| 467 | 8466 | 8962 | 9458 | 9954 | 10450 | 10946 | 11442 | 11938 |
| 468 | 8467 | 8963 | 9459 | 9955 | 10451 | 10947 | 11443 | 11939 |
| 469 | 8468 | 8964 | 9460 | 9956 | 10452 | 10948 | 11444 | 11940 |
| 470 | 8469 | 8965 | 9461 | 9957 | 10453 | 10949 | 11445 | 11941 |
| 471 | 8470 | 8966 | 9462 | 9958 | 10454 | 10950 | 11446 | 11942 |
| 472 | 8471 | 8967 | 9463 | 9959 | 10455 | 10951 | 11447 | 11943 |
| 473 | 8472 | 8968 | 9464 | 9960 | 10456 | 10952 | 11448 | 11944 |
| 474 | 8473 | 8969 | 9465 | 9961 | 10457 | 10953 | 11449 | 11945 |
| 475 | 8474 | 8970 | 9466 | 9962 | 10458 | 10954 | 11450 | 11946 |
| 476 | 8475 | 8971 | 9467 | 9963 | 10459 | 10955 | 11451 | 11947 |
| 477 | 8476 | 8972 | 9468 | 9964 | 10460 | 10956 | 11452 | 11948 |
| 478 | 8477 | 8973 | 9469 | 9965 | 10461 | 10957 | 11453 | 11949 |
| 479 | 8478 | 8974 | 9470 | 9966 | 10462 | 10958 | 11454 | 11950 |
| 480 | 8479 | 8975 | 9471 | 9967 | 10463 | 10959 | 11455 | 11951 |
| 481 | 8480 | 8976 | 9472 | 9968 | 10464 | 10960 | 11456 | 11952 |
| 482 | 8481 | 8977 | 9473 | 9969 | 10465 | 10961 | 11457 | 11953 |
| 483 | 8482 | 8978 | 9474 | 9970 | 10466 | 10962 | 11458 | 11954 |
| 484 | 8483 | 8979 | 9475 | 9971 | 10467 | 10963 | 11459 | 11955 |
| 485 | 8484 | 8980 | 9476 | 9972 | 10468 | 10964 | 11460 | 11956 |
| 486 | 8485 | 8981 | 9477 | 9973 | 10469 | 10965 | 11461 | 11957 |
| 487 | 8486 | 8982 | 9478 | 9974 | 10470 | 10966 | 11462 | 11958 |
| 488 | 8487 | 8983 | 9479 | 9975 | 10471 | 10967 | 11463 | 11959 |
| 489 | 8488 | 8984 | 9480 | 9976 | 10472 | 10968 | 11464 | 11960 |
| 490 | 8489 | 8985 | 9481 | 9977 | 10473 | 10969 | 11465 | 11961 |
| 491 | 8490 | 8986 | 9482 | 9978 | 10474 | 10970 | 11466 | 11962 |
| 492 | 8491 | 8987 | 9483 | 9979 | 10475 | 10971 | 11467 | 11963 |
| 493 | 8492 | 8988 | 9484 | 9980 | 10476 | 10972 | 11468 | 11964 |
| 494 | 8493 | 8989 | 9485 | 9981 | 10477 | 10973 | 11469 | 11965 |
| 495 | 8494 | 8990 | 9486 | 9982 | 10478 | 10974 | 11470 | 11966 |
| 496 | 8495 | 8991 | 9487 | 9983 | 10479 | 10975 | 11471 | 11967 |

1. An isolated antigen binding protein (ABP) that specifically binds a human cytotoxic T-lymphocyte associated protein 4 (CTLA-4), comprising a CDR1-L, a CDR2-L, a CDR3-L, a CDR1-H, a CDR2-H and a CDR3-H, wherein:
the CDR1-L consists of SEQ ID NO: 1002,
the CDR2-L consists of SEQ ID NO: 2002,
the CDR3-L consists of SEQ ID NO: 3002,
the CDR1-H consists of SEQ ID NO: 4002,
the CDR2-H consists of SEQ ID NO: 5002, and
the CDR3-H consists of SEQ ID NO: 6002.

2. (canceled)

3. (canceled)

4. (canceled)

5. The ABP of claim 1, comprising
a variable light chain (V_{L}) comprising a sequence at least 97% identical to a sequence of SEQ ID NO: 2 and a variable heavy chain (V_{H}) comprising a sequence at least 97% identical to a sequence of SEQ ID NO: 102.

6. (canceled)

7. The ABP of claim 1, comprising
a variable light chain (V_{L}) comprising a sequence of SEO ID NO: 2 and a variable heavy chain (V_{H}) comprising a sequence of SEO ID NO: 102.

8. (canceled)

9. The ABP of claim 1, wherein the ABP comprises an scFv or a full length monoclonal antibody.

10. The ABP of claim 1, wherein the ABP comprises an immunoglobulin constant region.

11. The ABP of claim 1, wherein the ABP binds human CTLA-4 with a K_{D} of less than 500 nM, or with a K_{D} of less than 200 nM, or with a K_{D} of less than 25 nM as measured by surface plasmon resonance or wherein the ABP binds to human CTLA-4 on a cell surface with a K_{D} of less than 25 nM.

12. (canceled)

13. (canceled)

14. (canceled)

15. A pharmaceutical composition comprising the ABP of claim 1 and an excipient.

16. A method of treating cancer in a subject, the method comprising:
administering to the subject in need thereof an effective amount of the ABP of claim 1.

17. (canceled)

18. The method of claim 16, further comprising the step of administering one or more additional therapeutic agents to the subject.

19. The method of claim 18, wherein the additional therapeutic agent is selected from CTLA-4 inhibitor, TIGIT inhibitor, a chemotherapy agent, an immune-stimulatory agent, radiation, a cytokine, a polynucleotide encoding a cytokine and a combination thereof.

20. An isolated polynucleotide encoding the ABP of claim 1.

21. A vector comprising the isolated polynucleotide of claim 20.

22. A host cell comprising the isolated polynucleotide of claim 20.

23. A method of producing an isolated ABP that specifically binds human CTLA-4, comprising:
expressing the ABP in the host cell of claim 22, and isolating the ABP.

The application's sequence listing, which the Patent Office published only in electronic form, follows.

SEQUENCE LISTING (11998 sequences)

SEQ ID NO: 1 - protein, 108 aa, Homo sapiens
EIVLTQSPGTLSLSPGEGATLSCRASQSFSSNYLAWYQQKPGQAPRLLIYGASSRATGIPDRFSGSGSGTDFTLTISRLEPEDFAVYYCQQYGTSPFTFGPGTKVDIK

SEQ ID NO: 2 - protein, 108 aa, Homo sapiens
EIVLTQSPGTLSLSPGERATLSCRASQSVSSSYLAWYQQKPGQAPRLLIYGASSRATGIPDRFSGSGSGTDFTLTISRLEPEDFAVYYCQQYGRSPFTFGPGTKVDIK

SEQ ID NO: 3 - protein, 108 aa, Homo sapiens
EIVLTQSPGTLSLSPGERATLSCRASQSVSSSYLAWYQQKPGQAPRLLIYGASSRATGIPDRFSGSGSGTDFTLTISRLEPEDFAVYYCQQYGSSPFTFGPGTKVDIK

SEQ ID NO: 4 - protein, 108 aa, Homo sapiens
EIVLTQSPGTLSLSPGDRATLSCRASQSGSSSYLAWYQQKPGQAPRLLIYGASSRATGIPDRFSGSGSGTDFTLTISRLEPEDFAVYYCQQYGTSPFTSGPGTKVDIK

SEQ ID NO: 5 - protein, 108 aa, Homo sapiens; identical to SEQ ID NO: 4

SEQ ID NO: 6 - protein, 107 aa, Homo sapiens
DIQMTQSPSSLSASVGDRVTITCRASQSISSYLNWYQQKPGKAPKLLIYAASSLQSGVPSRFSGSGSGTDFTLTISSLQPEDFATYYCQQSYSTPFTFGPGTKVDIK

SEQ ID NO: 7 - protein, 108 aa, Homo sapiens; identical to SEQ ID NO: 3

SEQ ID NO: 8 - protein, 106 aa, Homo sapiens
EIVLTQSPGTLSLSPGERATLSCRASQSVSYLAWYQQKPGQAPRLLIYGASSRATGIPDRFSGSGSGTDFTLTISRLEPEDFAVYYCQQYGSSPWTFGQGTKVEIK

SEQ ID NO: 9 - protein, 107 aa, Homo sapiens; identical to SEQ ID NO: 6

SEQ ID NO: 10 - protein, 108 aa, Homo sapiens; identical to SEQ ID NO: 3

SEQ ID NO: 11 - protein, 107 aa, Homo sapiens
DIQLTQSPSFLSASVGDRVTITCRASQGISSYLAWYQQKPGKAPKLLIYAASTLQSGVPSRFSGSGSGTEFTLTISSLQPEDFATYYCQQLNSYPPTFGQGTKVEIK

SEQ ID NO: 12 - protein, 108 aa, Homo sapiens
EIVLTQSPGTLSLSPGERATLSCRASQSVSSSYLAWYQQKPGQAPRLLIYGASSRATGIPDRFSGSGSGTDFTLTISRLEPEDFAVYYCQQYGTSPWTFGQGTKVEIK

SEQ ID NO: 13 - protein, 108 aa, Homo sapiens; identical to SEQ ID NO: 3

SEQ ID NO: 14 - protein, 108 aa, Homo sapiens
EIVLTQSPGTLSLSPGERATLSCRASQSVSSSYLAWYQQKPGQAPRLLIYGASSRATGIPDRFSGSGSGTDFTLTISRLEPEDFAVYYCQQYGSSPWTSGQGTKVEIK

SEQ ID NO: 15 - protein, 108 aa, Homo sapiens; identical to SEQ ID NO: 3

SEQ ID NO: 16 - protein, 107 aa, Homo sapiens
DIQMTQSPSSLSASVGDRVTITCRASQGISNYLAWYQQKPGKVPKLLIYAASTLQSGVPSRFSGSGSGTDFTLTISSLQPEDVATYYCQNYNSAPWTFGQGTKVEIK

SEQ ID NO: 17 - protein, 107 aa, Homo sapiens
DIQMTQSPSSLSASVGDRVTITCRASQAIRNDLGWYQQKPGKAPKRLIYAASSLQSGVPPRFSGSGSGTEFTLTISSLQPEDFATYYCLQHNSYPLTFGGGTKVEIK

SEQ ID NO: 18 - protein, 106 aa, Homo sapiens; identical to SEQ ID NO: 8

SEQ ID NO: 19 - protein, 109 aa, Homo sapiens
EIVLTQSPGTLSLSPGERATLSCRASQSVSSSYLAWYQQKPGQAPRLLIYGASSRATGIPDRFSGSGSGTDFTLTISRLEPEDFAVYYCQQYGSSSMYTFGQGTKLEIK

SEQ ID NO: 20 - protein, 108 aa, Homo sapiens; identical to SEQ ID NO: 2

SEQ ID NO: 21 - protein, 112 aa, Homo sapiens
DIVMTQSPLSLPVTPGEPASISCRSSQSLLHSNGYNYLDWYLQKPGQSPQLLIYLGSNRASGVPDRFSGSGSGTDFTLKISRVEAEDVGVYYCMQTLQTPLTFGGGTKVEIK

SEQ ID NO: 22 - protein, 107 aa, Homo sapiens; identical to SEQ ID NO: 17

SEQ ID NO: 23 - protein, 108 aa, Homo sapiens
EIVLTQSPGTLSLSPGERATLSCRASQSVSSSYLAWYQQKPGQAPRLLIYGASSRATGIPDRFSGSGSGTDFTLTISRLEPEDFAVYYCQQYGPSPWTFGQGTKVEIK

SEQ ID NO: 24 - protein, 107 aa, Homo sapiens
DIQMTQSPSSLSASVGDRVTITCRASQSISSYLNWYQQKPGKAPKLLIYAASSLQSGVPSRFSGSGSGTDFTLTISSLQPEDFATYYCQQSYRTPFTFGPGTKVDIK

SEQ ID NO: 25 - protein, 108 aa, Homo sapiens
EIVMTQSPATLSLSPGERATLSCRASQSVSSSYLSWYQQKPGQAPRLLIYGASTRATGIPARFSGSGSGTDFTLTISNLQPEDFAVYYCQQGYNLPFTAGPGTKVDIK

SEQ ID NO: 26 - protein, 112 aa, Homo sapiens
DVVMTQSPLSLPVTLGQPASISCRSSQSLVYSDGNTYLNWFQQRPGQSPRRLIYKVSNRDSGVPDRFSGSGSGTDFTLKISRVEAEDVGVYYCMQGTHWPITSGQGTRLEIK

SEQ ID NO: 27 - protein, 108 aa, Homo sapiens
EIVLTQSPGTLSLSPGERATLSCRASQSVSSSYLAWYQQKPGQAPRLLIYGASSRATGIPDRFSGSGSGTDFTLTISRLEPEDFAVYHCQQYGRSPWTLGQGTKVEIK

SEQ ID NO: 28 - protein, 108 aa, Homo sapiens; identical to SEQ ID NO: 14

SEQ ID NO: 29-100 - skipped (72 entries)

SEQ ID NO: 101 - protein, 120 aa, Homo sapiens
QVQLVESGGGVVQPGRSLRLSCAASGFTFSSFGMHWVRQAPGKGLEWVAVIWYDGRNKYYVDSVKGRFTISRDNSNNTLYLQMNSLRAEDTAVYYCARGEFFGEFFDYWGQGTLVTVSSA

SEQ ID NO: 102 - protein, 120 aa, Homo sapiens
QVQLVESGGGVVQPGRSLRLSCAASGFTFSNYGMNWVRQAPGKGLEWVAVIWYDGRNKHYADSVKGRFTISRDNSKNTLYLQMNSLRAEDTAVYYCARGGDWGPYFDYWGQGTLVTVSSA

SEQ ID NO: 103 - protein, 120 aa, Homo sapiens
QVQLVESGGGVVQPGRSLRLSCIASGFTFSSYGMHWVRQAPGKGLEWVAVNWYDGSNKHYADSVKGRFTISRDNSKNTLYLQMNSLRAEDTAVYYCARGGVWGPYFDYWGQGTLVTVSSA

SEQ ID NO: 104 - protein, 119 aa, Homo sapiens
QVQLVESGGGVVQPGRSLRISCAASGFTFSSYGIHWVRQAPGKGLQWVAVIWYDGRNKYYADSVKGRFTISRDNSKNTLYLQMNSLRAEDTAVYYCSRSGSFGAFDIWGQGTMVTVSSA

SEQ ID NO: 105 - protein, 121 aa, Homo sapiens
QVQLVESGGGVVQPGRSLRLSCAASGFTFSSYGMHWVRQAPGKGLEWVAVIWYDGNNKYYADSVKGRFTISRDNSKNTLYLQMYSLRAEDTAVYYCARGGILAAGIFDYWGQGTLVTVSSA

SEQ ID NO: 106 - protein, 124 aa, Homo sapiens
QVQLVESGGGVVQPGRSLRLSCAASGFTFSSYGMHWVRQAPGKGLEWVAVIWYDGSYKYYADSVKGRFTISRDDSKNTLYLQMSSLRAEDTAVYYCARAPHYAILTGYYEDYWGQGTLVTVSSA

SEQ ID NO: 107 - protein, 119 aa, Homo sapiens
QVQLVESGGGVVQPGRSLRLSCAASGFTLSSFGMHWVRQAPGKGLEWVAVIWYDGSNKYYADSVKGRFIISRDNSKTALYLQMNSLRAEDTAVYYCARAHYFGAFDIWGQGTMVTVSSA

SEQ ID NO: 108 - protein, 119 aa, Homo sapiens
QVQLVESGGGVVQPGRSLRLSCAASGFTFSRYGMHWVRQAPGKGLEWVAVIWYDGRNKYYADSVKGRFTISRDNSKNTLYLQMNSLRAEDTALYSCARAGELGPFDYWGQGTLVTVSSA

SEQ ID NO: 109 - protein, 120 aa, Homo sapiens
QVQLVESGGGVVQPGRSLRLSCAASGFTFSSHGMHWVRQAPGKGLEWVAVIWYDGSNKHYADSVKGRFTISRDNSKNTLYLQMNSLRAEDTAVYYCARGDILTGYYGYWGQGTLVTVSSA

SEQ ID NO: 110 - protein, 119 aa, Homo sapiens
QVQLVESGGGVVQPGRSLRLSCVASGFTLSSYGMHWVRQAPGKGLEWVAVIWYDGSNKHYADSVKGRFTISRDNSKNTLSLQMNSLRAEDTAVYYCARGGQLGPFDYWGQGTLVTVSSA

SEQ ID NO: 111 - protein, 123 aa, Homo sapiens
QVQLVESGGGVVQPGRSLRLSCAASGFTFSSYGMHWVRQAPGKGLEWVAVIWYDVGNKYYIDSVKGRFTISRDNSKNTLYLQMNSLRAEDTAVYYCARDYYGSGSPRHFDYWGQGTLVTVSSA

SEQ ID NO: 112 - protein, 119 aa, Homo sapiens
QVQLVESGGGVVQPGRSLRLSCAASGFTFSSYGMHWVRQAPGKGLEWVAVIWYDGSNKYYADSVKGRFTFSRDNSKNTLYLQMNSLRAEDTAVYYCARGGLMGAFDYWGQGTLVTVSSA

SEQ ID NO: 113 - protein, 120 aa, Homo sapiens
QVQLVESGGGVVQPGRSLRLSCAASGFTFSSYGMHWVRQAPGKGLEWVAVIWYDGRNKDYADSVKGRITISRDNSKNTLYLQMNSLRAEDTAVYYCARGGLLGPYFDYWGQGTLVTVSSA

SEQ ID NO: 114 - protein, 119 aa, Homo sapiens
QVQLVESGGGVVQPGRSLRLSCAASGFTFSSYGMHWVRQAPGTGLEWVAVIWYEGRNKYYADPVKGRFTISRDNSKNTLYLQMNSLRDDDTAVYYCARAGDLGAFDIWGQGTMVTVSSA

SEQ ID NO: 115 - protein, 119 aa, Homo sapiens
QVQLVESGGGVVQPGRSLRLSCAASGFTFRSYGMHWVRQAPGKGLEWVAVIWYDGSNKHYADSVKGRFTISRDNSKNTLYLQMNSLRAEDTAVYYCARNGLIGAFDIWGQGTMVTVSSA

SEQ ID NO: 116 - protein, 119 aa, Homo sapiens
QVQLVESGGGVVQPGRSLRLSCAASGFTFSSYGIHWVRQAPGKGLEWVAVIWYDGSNKYYADSVKGRFTISRDNSKNTLYLQMNSLRAEDTAVYYCARGSLLGPFDYWGQGTLVTVSSA

SEQ ID NO: 117 - protein, 119 aa, Homo sapiens
EVQLVESGGGLVQPGGSLRLSCAASGFTFSNYAMSWVRQAPGKGLEWVSAISGGGLSTYYADSVKGRFTISRDNSKNTLYLQMNSLRAEDTAVYYCAKDLLWLGFDYWGQGTLVTVSSA

SEQ ID NO: 118 - protein, 119 aa, Homo sapiens
QVQLVESGGGVVQPGRSLRLSCAASGFTFSSYGMHWVRQAPGKGLEWVAVIWYDGSNKFYADSVKGRFTISSDNSKNTLYLQMNSLRAEDTAVYYCARGGHLGSFDYWGQGTLVTVSSA

SEQ ID NO: 119 - protein, 124 aa, Homo sapiens
QVQLVQSGAEVKKPGASVKVSCKASGYTFTSYYMHWVRQAPGQGLEWMGIINPSVGSTSYAQKFQGRVTMTRDTSTSTVYMELSSLRSEDTAVYYCAREVRVRGVIIPFFDYWDQGTLVTVSSA

SEQ ID NO: 120 - protein, 117 aa, Homo sapiens
QVQLVQSGAEVKKPGASVKVSCKASGYTFTSYGISWVRQAPGQGLEWMGWISAYNGNTNYAQKFQGRVTMTTDTSTSTAYMELRSLRSDDTAVYYCAKVSGYFDYWGQGTLVTVSSA

SEQ ID NO: 121 - protein, 123 aa, Homo sapiens
QVQLVESGGGVVQPGRSLRLSCAASGFTFSSYGMHWVRQAPGKGLEWVAVIWYDGNNKYYADSVKGRFTISRDNSKNTLYLHMNSLRADDTAVYYCARMLRGAPYYYGMDVWGQGTTVTVSSA

SEQ ID NO: 122 - protein, 119 aa, Homo sapiens
EVQLVESGGGLVQPGGSLRLSCAASGFTFSSYAMSWVRQAPGKGLEWVSGISGSGGSTYYADSVKGRFTISRDNSKNTLYLQMNSLRAEDTAVYYCAKLGIAWYFDVWGRGTLVTVSSA

SEQ ID NO: 123 - protein, 119 aa, Homo sapiens
QVQLVQSGAEVKKPGASVKVSCKASGYTFTSYGISWVRQAPGQGLEWMGWISAYNGNTYYAQKFQGRVTMTTDTSTSTAYVELRSLRSDDTAVYYCARVTGRDAFDIWGQGTMVTVSSA

SEQ ID NO: 124 - protein, 118 aa, Homo sapiens
QVQLVQSGAEVKKPGASVKVSCKASGYTFTSYGISWVRQAPGQGLECMGWISAYNGNTNYAQKFQGRVTMITDTSTSTAYMELRSLRSDDTAVYYCARVGPINLDYWGQGTLVTVSSA

SEQ ID NO: 125 - protein, 118 aa, Homo sapiens
QVQLVQSGAEVKKPGASVKVSCKASGYTFTNYGISWVRQAPGQGLEWMGWISVYNGNTNYAQKFQGRVTMTTDTSTSTAYMELRSLISDDTAVYYCARLGKGLFDYWGQGTLVTVSSA

SEQ ID NO: 126 - protein, 121 aa, Homo sapiens
QVQLVQSGAEVKKPGASVKVSCKASDYTFTYYGISWVRQAPGQGLEWMGWISAYNGNTNYAQKLQGRVTMTTDTSTNTAYLELRSLRSDDTAVYYCARDYYDSSGYFDYWGQGTLVTVSSA

SEQ ID NO: 127 - protein, 117 aa, Homo sapiens
QVQLVQSGAEVKKPGASVKVSCKASGYTFTSYGISWVRQAPGQGLEWMGWISAYNGNTNYAQKLQGRVTMTTDTSTSTAYMELRSLRSDDTAVYYCGRWVRGVEYWGQGTLVTVSSA

SEQ ID NO: 128 - protein, 119 aa, Homo sapiens
QVQLVESGGGVVQPGRSLGLSCAASGFTFSTYGMHWVRQAPGKGLEWVAVTLYDGSNKYYADSVKGRFTISRDNSKNTLYLQMNSLRAEDTAVYYCARASLTGSFDYWGQGTLVTVSSA

SEQ ID NO: 129-1000 - skipped (872 entries)

SEQ ID NO: 1001 - protein, 7 aa, Homo sapiens
QSFSSNY

SEQ ID NO: 1002 - protein, 7 aa, Homo sapiens
QSVSSSY

SEQ ID NO: 1003 - protein, 7 aa, Homo sapiens
QSVSSSY

SEQ ID NO: 1004 - protein, 7 aa, Homo sapiens
QSGSSSY

SEQ ID NO: 1005 - protein, 7 aa, Homo sapiens
QSGSSSY

SEQ ID NO: 1006 - protein, 6 aa, Homo sapiens
QSISSY

SEQ ID NO: 1007 - protein, 7 aa, Homo sapiens
QSVSSSY

SEQ ID NO: 1008 - protein, 5 aa, Homo sapiens
QSVSY

SEQ ID NO: 1009 - protein, 6 aa, Homo sapiens
QSISSY

SEQ ID NO: 1010 - protein, 7 aa, Homo sapiens
QSVSSSY

SEQ ID NO: 1011 - protein, 6 aa, Homo sapiens
QGISSY

SEQ ID NO: 1012 - protein, 7 aa, Homo sapiens
QSVSSSY

SEQ ID NO: 1013 - protein, 7 aa, Homo sapiens
QSVSSSY

SEQ ID NO: 1014 - protein, 7 aa, Homo sapiens
QSVSSSY

SEQ ID NO: 1015 - protein, 7 aa, Homo sapiens
QSVSSSY

SEQ ID NO: 1016 - protein, 6 aa, Homo sapiens
QGISNY

SEQ ID NO: 1017 - protein, 6 aa, Homo sapiens
QAIRND

SEQ ID NO: 1018 - protein, 5 aa, Homo sapiens
QSVSY

SEQ ID NO: 1019 - protein, 7 aa, Homo sapiens
QSVSSSY

SEQ ID NO: 1020 - protein, 7 aa, Homo sapiens
QSVSSSY

SEQ ID NO: 1021 - protein, 11 aa, Homo sapiens
QSLLHSNGYNY

SEQ ID NO: 1022 - protein, 6 aa, Homo sapiens
QAIRND

SEQ ID NO: 1023 - protein, 7 aa, Homo sapiens
QSVSSSY

SEQ ID NO: 1024 - protein, 6 aa, Homo sapiens
QSISSY

SEQ ID NO: 1025 - protein, 7 aa, Homo sapiens
QSVSSSY

SEQ ID NO: 1026 - protein, 11 aa, Homo sapiens
QSLVYSDGNTY

SEQ ID NO: 1027 - protein, 7 aa, Homo sapiens
QSVSSSY

SEQ ID NO: 1028 - protein, 7 aa, Homo sapiens
QSVSSSY

SEQ ID NO: 1029-3000 - skipped (1972 entries)

SEQ ID NO: 3001 - protein, 9 aa, Homo sapiens
QQYGTSPFT

SEQ ID NO: 3002 - protein, 9 aa, Homo sapiens
QQYGRSPFT

SEQ ID NO: 3003 - protein, 9 aa, Homo sapiens
QQYGSSPFT

SEQ ID NO: 3004 - protein, 9 aa, Homo sapiens
QQYGTSPFT

SEQ ID NO: 3005 - protein, 9 aa, Homo sapiens
QQYGTSPFT

SEQ ID NO: 3006 - protein, 9 aa, Homo sapiens
QQSYSTPFT

SEQ ID NO: 3007 - protein, 9 aa, Homo sapiens
QQYGSSPFT

SEQ ID NO: 3008 - protein, 9 aa, Homo sapiens
QQYGSSPWT

SEQ ID NO: 3009 - protein, 9 aa, Homo sapiens
QQSYSTPFT

SEQ ID NO: 3010 - protein, 9 aa, Homo sapiens
QQYGSSPFT

SEQ ID NO: 3011 - protein, 9 aa, Homo sapiens
QQLNSYPPT

SEQ ID NO: 3012 - protein, 9 aa, Homo sapiens
QQYGTSPWT

SEQ ID NO: 3013 - protein, 9 aa, Homo sapiens
QQYGSSPFT

SEQ ID NO: 3014 - protein, 9 aa, Homo sapiens
QQYGSSPWT

SEQ ID NO: 3015 - protein, 9 aa, Homo sapiens
QQYGSSPFT

SEQ ID NO: 3016 - protein, 9 aa, Homo sapiens
QNYNSAPWT

SEQ ID NO: 3017 - protein, 9 aa, Homo sapiens
LQHNSYPLT

SEQ ID NO: 3018 - protein, 9 aa, Homo sapiens
QQYGSSPWT

SEQ ID NO: 3019 - protein, 10 aa, Homo sapiens
QQYGSSSMYT

SEQ ID NO: 3020 - protein, 9 aa, Homo sapiens
QQYGRSPFT

SEQ ID NO: 3021 - protein, 9 aa, Homo sapiens
MQTLQTPLT

SEQ ID NO: 3022 - protein, 9 aa, Homo sapiens
LQHNSYPLT

SEQ ID NO: 3023 - protein, 9 aa, Homo sapiens
QQYGPSPWT

SEQ ID NO: 3024 - protein, 9 aa, Homo sapiens
QQSYRTPFT

SEQ ID NO: 3025 - protein, 9 aa, Homo sapiens
QQGYNLPFT

SEQ ID NO: 3026 - protein, 9 aa, Homo sapiens
MQGTHWPIT

SEQ ID NO: 3027 - protein, 9 aa, Homo sapiens
QQYGRSPWT

SEQ ID NO: 3028 - protein, 9 aa, Homo sapiens
QQYGSSPWT

SEQ ID NO: 3029-4000 - skipped (972 entries)

SEQ ID NO: 4001 - protein, 8 aa, Homo sapiens
GFTFSSFG

SEQ ID NO: 4002 - protein, 8 aa, Homo sapiens
GFTFSNYG

SEQ ID NO: 4003 - protein, 8 aa, Homo sapiens
GFTFSSYG

SEQ ID NO: 4004 - protein, 8 aa, Homo sapiens
GFTFSSYG

SEQ ID NO: 4005 - protein, 8 aa, Homo sapiens
GFTFSSYG

SEQ ID NO: 4006 - protein, 8 aa, Homo sapiens
GFTFSSYG

SEQ ID NO: 4007 - protein, 8 aa, Homo sapiens
GFTLSSFG

SEQ ID NO: 4008 - protein, 8 aa, Homo sapiens
GFTFSRYG

SEQ ID NO: 4009 - protein, 8 aa, Homo sapiens
GFTFSSHG

SEQ ID NO: 4010 - protein, 8 aa, Homo sapiens
GFTLSSYG

SEQ ID NO: 4011 - protein, 8 aa, Homo sapiens
GFTFSSYG

SEQ ID NO: 4012 - protein, 8 aa, Homo sapiens
GFTFSSYG

SEQ ID NO: 4013 - protein, 8 aa, Homo sapiens
GFTFSSYG

SEQ ID NO: 4014 - protein, 8 aa, Homo sapiens
GFTFSSYG

SEQ ID NO: 4015 - protein, 8 aa, Homo sapiens
GFTFRSYG

SEQ ID NO: 4016 - protein, 8 aa, Homo sapiens
GFTFSSYG

SEQ ID NO: 4017 - protein, 8 aa, Homo sapiens
GFTFSNYA

SEQ ID NO: 4018 - protein, 8 aa, Homo sapiens
GFTFSSYG

SEQ ID NO: 4019 - protein, 8 aa, Homo sapiens
GYTFTSYY

SEQ ID NO: 4020 - protein, 8 aa, Homo sapiens
GYTFTSYG

SEQ ID NO: 4021 - protein, 8 aa, Homo sapiens
GFTFSSYG

SEQ ID NO: 4022 - protein, 8 aa, Homo sapiens
GFTFSSYA

SEQ ID NO: 4023 - protein, 8 aa, Homo sapiens
GYTFTSYG

SEQ ID NO: 4024 - protein, 8 aa, Homo sapiens
GYTFTSYG

SEQ ID NO: 4025 - protein, 8 aa, Homo sapiens
GYTFTNYG

SEQ ID NO: 4026 - protein, 8 aa, Homo sapiens
DYTFTYYG

SEQ ID NO: 4027 - protein, 8 aa, Homo sapiens
GYTFTSYG

SEQ ID NO: 4028 - protein, 8 aa, Homo sapiens
GFTFSTYG

SEQ ID NO: 4029-5000 - skipped (972 entries)

SEQ ID NO: 5001 - protein, 8 aa, Homo sapiens
IWYDGRNK

SEQ ID NO: 5002 - protein, 8 aa, Homo sapiens
IWYDGRNK

SEQ ID NO: 5003 - protein, 8 aa, Homo sapiens
NWYDGSNK

SEQ ID NO: 5004 - protein, 8 aa, Homo sapiens
IWYDGRNK

SEQ ID NO: 5005 - protein, 8 aa, Homo sapiens
IWYDGNNK

SEQ ID NO: 5006 - protein, 8 aa, Homo sapiens
IWYDGSYK

SEQ ID NO: 5007 - protein, 8 aa, Homo sapiens
IWYDGSNK

SEQ ID NO: 5008 - protein, 8 aa, Homo sapiens
IWYDGRNK

SEQ ID NO: 5009 - protein, 8 aa, Homo sapiens
IWYDGSNK

SEQ ID NO: 5010 - protein, 8 aa, Homo sapiens
IWYDGSNK

SEQ ID NO: 5011 - protein, 8 aa, Homo sapiens
IWYDVGNK

SEQ ID NO: 5012 - protein, 8 aa, Homo sapiens
IWYDGSNK

SEQ ID NO: 5013 - protein, 8 aa, Homo sapiens
IWYDGRNK

SEQ ID NO: 5014 - protein, 8 aa, Homo sapiens
IWYEGRNK

SEQ ID NO: 5015 - protein, 8 aa, Homo sapiens
IWYDGSNK

SEQ ID NO: 5016 - protein, 8 aa, Homo sapiens
IWYDGSNK

SEQ ID NO: 5017 - protein, 8 aa, Homo sapiens
ISGGGLST

SEQ ID NO: 5018 - protein, 8 aa, Homo sapiens
IWYDGSNK

SEQ ID NO: 5019 - protein, 8 aa, Homo sapiens
INPSVGST

SEQ ID NO: 5020 - protein, 8 aa, Homo sapiens
ISAYNGNT

SEQ ID NO: 5021 - protein, 8 aa, Homo sapiens
IWYDGNNK

SEQ ID NO: 5022 - protein, 8 aa, Homo sapiens
ISGSGGST

SEQ ID NO: 5023 - protein, 8 aa, Homo sapiens
ISAYNGNT

SEQ ID NO: 5024 - protein, 8 aa, Homo sapiens
ISAYNGNT

SEQ ID NO: 5025 - protein, 8 aa, Homo sapiens
ISVYNGNT

SEQ ID NO: 5026 - protein, 8 aa, Homo sapiens
ISAYNGNT

SEQ ID NO: 5027 - protein, 8 aa, Homo sapiens
ISAYNGNT

SEQ ID NO: 5028 - protein, 8 aa, Homo sapiens
TLYDGSNK

SEQ ID NO: 5029-6000 - skipped (972 entries)

SEQ ID NO: 6001 - protein, 12 aa, Homo sapiens
ARGEFFGEFFDY

SEQ ID NO: 6002 - protein, 12 aa, Homo sapiens
ARGGDWGPYFDY

SEQ ID NO: 6003 - protein, 12 aa, Homo sapiens
ARGGVWGPYFDY

SEQ ID NO: 6004 - protein, 11 aa, Homo sapiens
SRSGSFGAFDI

SEQ ID NO: 6005 - protein, 13 aa, Homo sapiens
ARGGILAAGIFDY

SEQ ID NO: 6006 - protein, 16 aa, Homo sapiens
ARAPHYAILTGYYEDY

SEQ ID NO: 6007 - protein, 11 aa, Homo sapiens
ARAHYFGAFDI

SEQ ID NO: 6008 - protein, 11 aa, Homo sapiens
ARAGELGPFDY

SEQ ID NO: 6009 - protein, 12 aa, Homo sapiens
ARGDILTGYYGY

SEQ ID NO: 6010 - protein, 11 aa, Homo sapiens
ARGGQLGPFDY

SEQ ID NO: 6011 - protein, 15 aa, Homo sapiens
ARDYYGSGSPRHFDY

SEQ ID NO: 6012 - protein, 11 aa, Homo sapiens
ARGGLMGAFDY

SEQ ID NO: 6013 - protein, 12 aa, Homo sapiens
ARGGLLGPYFDY

SEQ ID NO: 6014 - protein, 11 aa, Homo sapiens
ARAGDLGAFDI

SEQ ID NO: 6015 - protein, 11 aa, Homo sapiens
ARNGLIGAFDI

SEQ ID NO: 6016 - protein, 11 aa, Homo sapiens
ARGSLLGPFDY

SEQ ID NO: 6017 - protein, 11 aa, Homo sapiens
AKDLLWLGFDY

SEQ ID NO: 6018 - protein, 11 aa, Homo sapiens
ARGGHLGSFDY

SEQ ID NO: 6019 - protein, 16 aa, Homo sapiens
AREVRVRGVIIPFFDY

SEQ ID NO: 6020 - protein, 9 aa, Homo sapiens
AKVSGYFDY

SEQ ID NO: 6021 - protein, 15 aa, Homo sapiens
ARMLRGAPYYYGMDV

SEQ ID NO: 6022 - protein, 11 aa, Homo sapiens
AKLGIAWYFDV

SEQ ID NO: 6023 - protein, 11 aa, Homo sapiens
ARVTGRDAFDI

SEQ ID NO: 6024 - protein, 10 aa, Homo sapiens
ARVGPINLDY

SEQ ID NO: 6025 - protein, 10 aa, Homo sapiens
ARLGKGLFDY

SEQ ID NO: 6026 - protein, 13 aa, Homo sapiens
ARDYYDSSGYFDY

SEQ ID NO: 6027 - protein, 9 aa, Homo sapiens
GRWVRGVEY

SEQ ID NO: 6028 - protein, 11 aa, Homo sapiens
ARASLTGSFDY

SEQ ID NO: 6029-7000 - skipped (972 entries)

SEQ ID NO: 7001 - protein, 223 aa, Homo sapiens [sequence omitted]

SEQ ID NO: 7002 - protein, 8 aa, synthetic construct
  REGION 1..8: note = Description of Artificial Sequence: Synthetic peptide
DYKDDDDK

SEQ ID NO: 7003-7999 - skipped (997 entries)

SEQ ID NO: 8000 - protein, 107 aa, Homo sapiens
  REGION 1..107: note = Light chain
DIQMTQSPSSLSASVGDRVTITCRASQSISSYLNWYQQKPGKAPKLLIYASSSLQSGVPSRFSGSRSGTDFTLTISSLQPEDFATYYCQQSYSTPYTFGQGTKLEIK

SEQ ID NO: 8001 - protein, 107 aa, Homo sapiens
  REGION 1..107: note = Light chain
DIQMTQSPSSLSASVGDRVTITCRASQGISNYLAWYQQKPGKVPKLLIYAASTLQSGVPSRFSGSGSGTDFTLTISSLQPEDVATYYCQKYNSAPLTFGGGTKVEIK

SEQ ID NO: 8002 - protein, 107 aa, Homo sapiens
  REGION 1..107: note = Light chain
EIVMTQSPATLSVSPGERATLSCRASQSVSSNLAWYQQKPGQAPRLLIYGASTRATGIPARFSGSGSGTEFTLTISSLQSEDFAVYYCQQYNNWPYTFGQGTKLEIK

SEQ ID NO: 8003 - protein, 107 aa, Homo sapiens
  REGION 1..107: note = Light chain
DIQMTQSPSSLSASVGDRVTITCRASQGIRNDLGWYQQKPGKAPKRLIYAASSLQSGVPSRFSGSGSGTEFTLTISSLQPEDFATYYCLQHNTYPFTFGPGTKVDIK

SEQ ID NO: 8004 - protein, 107 aa, Homo sapiens
  REGION 1..107: note = Light chain
DIQMTQSPSSLSASVGDRVTITCRASQGIRNDLGWYQQKPGKAPKRLIYAASSLQSGVPSRFSGSGSGTEFTLTISSLQPEDFATYYCLQHNSYPYTFGQGTKLEIK

SEQ ID NO: 8005 - protein, 107 aa, Homo sapiens; identical to SEQ ID NO: 8004
  REGION 1..107: note = Light chain

SEQ ID NO: 8006 - protein, 107 aa, Homo sapiens
  REGION 1..107: note = Light chain
DIQLTQSPSFLSASVGDRVTITCRASQGISSYLAWYQQKPGKAPKLLIYAASTLQSGVPSRFSGSGSGTEFTLTISSLQPEDFATYYCQQFNSYPYTFGQGTKLEIK

SEQ ID NO: 8007 - protein, 108 aa, Homo sapiens
  REGION 1..108: note = Light chain
EIVLTQSPGTLSLSPGERATLSCRASQSVSSSYLAWYQQKPGQAPRLLIYGASSRATGIPDRFSGSGSGTDFTLTISRLEPEDFAVYYCQQYGNSPYTFGQGTKLEIK

SEQ ID NO: 8008 - protein, 107 aa, Homo sapiens
  REGION 1..107: note = Light chain
DIQMTQSPSSLSASVGDRVTITCRASQGIRNDLGWYQQKPGKAPKRLIYAASSLQSGVPSRFSGSGSGTEFTLTISSLQPEDFATYYCLQHNSYPWTFGQGTKVEIK

SEQ ID NO: 8009 - protein, 107 aa, Homo sapiens; identical to SEQ ID NO: 8008
  REGION 1..107: note = Light chain

SEQ ID NO: 8010 - protein, 107 aa, Homo sapiens; identical to SEQ ID NO: 8008
  REGION 1..107: note = Light chain

SEQ ID NO: 8011 - protein, 107 aa, Homo sapiens
  REGION 1..107: note = Light chain
DIQMTQSPSSLSASVGDRVTITCRASQVIRNDLGWYQQKPGKAPKRLIYAASSLQSGVPSRFTGSGSGTEFTLTISSLQPEDFATYYCLQHNSYPFTFGPGTKVDIK

SEQ ID NO: 8012 - protein, 108 aa, Homo sapiens
  REGION 1..108: note = Light chain
EIVLTQSPGILSLSPGERATLSCRTSQSVSSSYFAWYQQIPGQAPRLLIYGTSSRATGIPDRFSGSGSGTDFTLTISRLEPEDFAVYYCQQYGSSPRTFGQGTKVEIK

SEQ ID NO: 8013 - protein, 107 aa, Homo sapiens
  REGION 1..107: note = Light chain
EIVLTQSPGTLSLSPGERATLSCRASQSVSSSYLAWYQQKPGQAPRLLIYGASSRATGIPDRFSGSGSGTDFTLTISRLEPEDFAVYYCQQYGSSYTFGQGTKLEIK

SEQ ID NO: 8014 - protein, 107 aa, Homo sapiens
  REGION 1..107: note = Light chain
DIQMTQSPSSLSASVGDRVTITCRASQGISNYLAWYQQKPGKVPKLLIYAASTLQSGVPSRFSGSGSGTDFTLTISSLQPEDVATYYCQKYNSAPYTFGQGTKLEIK

SEQ ID NO: 8015 - protein, 107 aa, Homo sapiens
  REGION 1..107: note = Light chain
DIQMTQSPSSLSASVGDRVTITCRASQGIRNDLGWYQQKPGKAPKRLIYAASSLQSGVPSRFSGSGSGTEFTLTISSLQPEDFATYYCQQLNSYPRTFGQGTKVEIK

SEQ ID NO: 8016 - protein, 107 aa, Homo sapiens; identical to SEQ ID NO: 8008
  REGION 1..107: note = Light chain

SEQ ID NO: 8017 - protein, 107 aa, Homo sapiens
  REGION 1..107: note = Light chain
DIQMTQSPSSLSASVGDRVTITCRASQSISSYLNWYQQKPGKAPKLLIYAASSLQSGVPSRFSGSGSGTDFTLTISSLQPEDFATYYCQQSYSTPITFGQGTRLEIK

SEQ ID NO: 8018 - protein, 107 aa, Homo sapiens
  REGION 1..107: note = Light chain
DIQLTQSPSFLSAFVGDRVTITCRASQGISRYLAWYQQKPGKAPKLLIYTASTLQSGVPSRFSGSGSGTEFTLTISSLQPEDFATYYCQQLNSYPYTFGQGTKLEIK

SEQ ID NO: 8019 - protein, 107 aa, Homo sapiens; identical to SEQ ID NO: 8000
  REGION 1..107: note = Light chain

SEQ ID NO: 8020 - protein, 107 aa, Homo sapiens; identical to SEQ ID NO: 8000
  REGION 1..107: note = Light chain

SEQ ID NO: 8021 - protein, 107 aa, Homo sapiens; identical to SEQ ID NO: 8017
  REGION 1..107: note = Light chain

SEQ ID NO: 8022 - protein, 107 aa, Homo sapiens
  REGION 1..107: note = Light chain
DIQMTQSPSSLSASVGDRVTITCRASQGISSYLNWYQQKPGKAPKLLIYAASSLQSGVPSRFSGSGSGTDFTLTISSLQPEDFATYYCQQSYSYPYTFGQGTKLEIK

SEQ ID NO: 8023 - protein, 107 aa, Homo sapiens; identical to SEQ ID NO: 8000
  REGION 1..107: note = Light chain

SEQ ID NO: 8024 - protein, 107 aa, Homo sapiens; identical to SEQ ID NO: 8006
  REGION 1..107: note = Light chain

SEQ ID NO: 8025 - protein, 107 aa, Homo sapiens; identical to SEQ ID NO: 8000
  REGION 1..107: note = Light chain

SEQ ID NO: 8026 - protein, 107 aa, Homo sapiens; identical to SEQ ID NO: 8008
  REGION 1..107: note = Light chain

SEQ ID NO: 8027 - protein, 107 aa, Homo sapiens; identical to SEQ ID NO: 8015
  REGION 1..107: note = Light chain

SEQ ID NO: 8028 - protein, 108 aa, Homo sapiens
  REGION 1..108: note = Light chain
EIVLTQSPGTLSLSPGERATLSCRASQSVSSSYLAWYQQKPGQAPRLLIYGASSRATGIPDRFSGSGSGTDFTLTISRLEPEDFAVYYCQQYGSSPYTFGQGTKLEIK

SEQ ID NO: 8029 - protein, 107 aa, Homo sapiens; identical to SEQ ID NO: 8000
  REGION 1..107: note = Light chain

SEQ ID NO: 8030 - protein, 107 aa, Homo sapiens
  REGION 1..107: note = Light chain
AIQMTQSPSSLSASVGDRVTITCRASQDIRNDLGWYQQKPGKAPKLLIYAASSLQSGVPSRFSGSGSGTDFTLTISSLQPEDFATYYCLQDYNYPWTFGQGTKVEIK

SEQ ID NO: 8031 - protein, 107 aa, Homo sapiens; identical to SEQ ID NO: 8013
  REGION 1..107: note = Light chain

SEQ ID NO: 8032 - protein, 107 aa, Homo sapiens; identical to SEQ ID NO: 8000
  REGION 1..107: note = Light chain

SEQ ID NO: 8033 - protein, 107 aa, Homo sapiens; identical to SEQ ID NO: 8000
  REGION 1..107: note = Light chain

SEQ ID NO: 8034 - protein, 107 aa, Homo sapiens; identical to SEQ ID NO: 8008
  REGION 1..107: note = Light chain

SEQ ID NO: 8035 - protein, 107 aa, Homo sapiens; identical to SEQ ID NO: 8006
  REGION 1..107: note = Light chain

SEQ ID NO: 8036 - protein, 107 aa, Homo sapiens; identical to SEQ ID NO: 8000
  REGION 1..107: note = Light chain

SEQ ID NO: 8037 - protein, 107 aa, Homo sapiens; identical to SEQ ID NO: 8000
  REGION 1..107: note = Light chain

SEQ ID NO: 8038 - protein, 107 aa, Homo sapiens; identical to SEQ ID NO: 8013
  REGION 1..107: note = Light chain

SEQ ID NO: 8039 - protein, 107 aa, Homo sapiens; identical to SEQ ID NO: 8008
  REGION 1..107: note = Light chain

SEQ ID NO: 8040 - protein, 108 aa, Homo sapiens
  REGION 1..108: note = Light chain
EIVMTQSPATLSLSPGERATLSCRASQSVSSSYLSWYQQKPGQAPRLLIHGASTRATGIPARFSGSGSGTDFTLTISSLQPEDFALYYCQQDYNLPYTFGQGTKLEIK

SEQ ID NO: 8041 - protein, 107 aa, Homo sapiens
  REGION 1..107: note = Light chain
DIQMTQSPSSLSASVGDRVTITCRASQGIRNDLGWYQQKPGKAPKRLIYAASSLQSGVPSRFSGSGSGTDFTLTISSLQPEDFATYYCQQSYSNPLTFGGGTKVEIK

SEQ ID NO: 8042 - protein, 107 aa, Homo sapiens; identical to SEQ ID NO: 8000
  REGION 1..107: note = Light chain

SEQ ID NO: 8043 - protein, 108 aa, Homo sapiens
  REGION 1..108: note = Light chain
EIVMTQSPATLSLSPGERATLSCRASQSVSSSYLSWYQQQPGQAPRLLIFGASTRATGIPARFSGSGSGTDFTLTISSLQPEDFAVYYCQQDYNLPLTFGGGTKLEIK

SEQ ID NO: 8044 - protein, 107 aa, Homo sapiens; identical to SEQ ID NO: 8006
  REGION 1..107: note = Light chain

SEQ ID NO: 8045 - protein, 107 aa, Homo sapiens; identical to SEQ ID NO: 8008
  REGION 1..107: note = Light chain

SEQ ID NO: 8046 - protein, 107 aa, Homo sapiens; identical to SEQ ID NO: 6
  REGION 1..107: note = Light chain

SEQ ID NO: 8047 - protein, 107 aa, Homo sapiens; identical to SEQ ID NO: 6
  REGION 1..107: note = Light chain

SEQ ID NO: 8048 - protein, 108 aa, Homo sapiens
  REGION 1..108: note = Light chain
EIVLTQSPGTLSLSPGERATLSCRASQSVSSSYLAWYQQKPGQAPRLLIYGASSRATGIPDRFSGSGSGTDFTLTISRLEPEDFAVYYCQQYGSSPWTFGQGTKVEIK

SEQ ID NO: 8049 - protein, 108 aa, Homo sapiens; identical to SEQ ID NO: 3
  REGION 1..108: note = Light chain

SEQ ID NO: 8050 - protein, 107 aa, Homo sapiens
  REGION 1..107: note = Light chain
DIQMTQSPSSLSASVGDRVTITCQASQDISNYLNWYQQKPGKAPKLLIYDASNLETGVPSRFSGSGSGTDFTFTISSLQPEDIATYYCQQYDNLPITFGQGTRLEIK

SEQ ID NO: 8051 - protein, 108 aa, Homo sapiens; identical to SEQ ID NO: 8048
  REGION 1..108: note = Light chain

SEQ ID NO: 8052 - protein, 108 aa, Homo sapiens; identical to SEQ ID NO: 8048
  REGION 1..108: note = Light chain

SEQ ID NO: 8053 - protein, 112 aa, Homo sapiens
  REGION 1..112: note = Light chain
DIVMTQSPLSLPVTPGEPASISCRSSQSLLHSNGYNYLDWYLQKPGQSPQLLIYLGSNRASGVPDRFSGSGSGTDFTLKISRVEAEDVGVYYCMQALQTPLTFGGGTKVEIK

SEQ ID NO: 8054 - protein, 107 aa, Homo sapiens; identical to SEQ ID NO: 6
  REGION 1..107: note = Light chain

SEQ ID NO: 8055 - protein, 108 aa, Homo sapiens; identical to SEQ ID NO: 8048
  REGION 1..108: note = Light chain

SEQ ID NO: 8056 - protein, 108 aa, Homo sapiens
  REGION 1..108: note = Light chain
EIVLTQSPGTLSLSPGERATLSCRASQSVSSSYLAWYQQKPGQAPRLLIYGASSRATGIPDRFSGSGSGTDFTLTISRLEPEDFVVYYCQQYGRSPWTFGQGTKVEIK

SEQ ID NO: 8057 - protein, 108 aa, Homo sapiens
  REGION 1..108: note = Light chain
EIVLTQSPGTLSLSPGERATLSCRASQSISSSYLAWYQQKPGQAPRLLIYGASSRATGIPDRFSGSGSGTDITLTISRLEPEDFAVYYCQQYGNSPWTFGQGTKVEIK

SEQ ID NO: 8058 - protein, 107 aa, Homo sapiens; identical to SEQ ID NO: 6
  REGION 1..107: note = Light chain

SEQ ID NO: 8059 - protein, 108 aa, Homo sapiens
  REGION 1..108: note = Light chain
EIVLTQSPGTLSLSPGERATLSCRASQSVSSSSLAWYQQKPGQAPRLLIYGASSRATGIPDRFSGSGSGTDFTLTISRLAPEDFAVYYCQQYGTSPWTFGQGTKVEIK

SEQ ID NO: 8060 - protein, 107 aa, Homo sapiens; identical to SEQ ID NO: 6
  REGION 1..107: note = Light chain

SEQ ID NO: 8061 - protein, 108 aa, Homo sapiens; identical to SEQ ID NO: 3
  REGION 1..108: note = Light chain

SEQ ID NO: 8062 - protein, 108 aa, Homo sapiens; identical to SEQ ID NO: 3
  REGION 1..108: note = Light chain

SEQ ID NO: 8063 - protein, 108 aa, Homo sapiens; identical to SEQ ID NO: 3
  REGION 1..108: note = Light chain

SEQ ID NO: 8064 - protein, 108 aa, Homo sapiens; identical to SEQ ID NO: 8048
  REGION 1..108: note = Light chain

SEQ ID NO: 8065 - protein, 112 aa, Homo sapiens; identical to SEQ ID NO: 8053
  REGION 1..112: note = Light chain

SEQ ID NO: 8066 - protein, 108 aa, Homo sapiens; identical to SEQ ID NO: 3
  REGION 1..108: note = Light chain

SEQ ID NO: 8067 - protein, 107 aa, Homo sapiens; identical to SEQ ID NO: 6
  REGION 1..107: note = Light chain

SEQ ID NO: 8068 - protein, 107 aa, Homo sapiens; identical to SEQ ID NO: 6
  REGION 1..107: note = Light chain

SEQ ID NO: 8069 - protein, 107 aa, Homo sapiens
  REGION 1..107: note = Light chain
DIQMTQSPSSLSASVGDRVTITCRASQSISSFLNWYQQKPGKAPKLLIYAASSLQSGVPSRFSGSGSGTDFTLTISSLQPEDFAAYYCQQGYSTPFTFGPGTKVDIK

SEQ ID NO: 8070 - protein, 108 aa, Homo sapiens; identical to SEQ ID NO: 8048
  REGION 1..108: note = Light chain

SEQ ID NO: 8071 - protein, 107 aa, Homo sapiens
  REGION 1..107: note = Light chain
DIQMTQSPSSLSASVGDRVTITCRASQSISSFLNWYQQKPGKAPKLLIYAASSLQSGVPSRFSGSGSGTDFTLTISSLQPEDFAAYYCQQSYSTPFAFGPGTKVDIK

SEQ ID NO: 8072 - protein, 107 aa, Homo sapiens; identical to SEQ ID NO: 6
  REGION 1..107: note = Light chain

SEQ ID NO: 8073 - protein, 108 aa, Homo sapiens; identical to SEQ ID NO: 3
  REGION 1..108: note = Light chain

SEQ ID NO: 8074 - protein, 107 aa, Homo sapiens; identical to SEQ ID NO: 6
  REGION 1..107: note = Light chain

SEQ ID NO: 8075 - protein, 108 aa, Homo sapiens; identical to SEQ ID NO: 8048
  REGION 1..108: note = Light chain

SEQ ID NO: 8076 - protein, 107 aa, Homo sapiens; identical to SEQ ID NO: 6
  REGION 1..107: note = Light chain

SEQ ID NO: 8077 - protein, 108 aa, Homo sapiens; identical to SEQ ID NO: 8048
  REGION 1..108: note = Light chain

SEQ ID NO: 8078 - protein, 108 aa, Homo sapiens; identical to SEQ ID NO: 8048
  REGION 1..108: note = Light chain

SEQ ID NO: 8079 - protein, 107 aa, Homo sapiens; identical to SEQ ID NO: 6
  REGION 1..107: note = Light chain

SEQ ID NO: 8080 - protein, 107 aa, Homo sapiens; identical to SEQ ID NO: 6
  REGION 1..107: note = Light chain

SEQ ID NO: 8081 - protein, 108 aa, Homo sapiens
  REGION 1..108: note = Light chain
EIVLTQSPGTLSLSPGERATLSCRASQSVSSSYLAWYQQKPGQAPRLLIYGASSRATGIPDRFSGSGSGTDFTLTISRLEPADFAVYHCQQFGSSPWTFGQGTKVEIK

SEQ ID NO: 8082 - protein, 107 aa, Homo sapiens
  REGION 1..107: note = Light chain
DIQMTQSPSFLSASVGDRVTITCRASQGISSYLAWYQQKPGKAPKLLIYAASTLQSGVPSRFSGSGSGTEFTLTISSLQPEDFATYYCQQLNSYPRTLGQGTKVEIK

SEQ ID NO: 8083 - protein, 112 aa, Homo sapiens; identical to SEQ ID NO: 8053
  REGION 1..112: note = Light chain

SEQ ID NO: 8084 - protein, 108 aa, Homo sapiens; identical to SEQ ID NO: 12
  REGION 1..108: note = Light chain

SEQ ID NO: 8085 - protein, 108 aa, Homo sapiens
  REGION 1..108: note = Light chain
EIVLTQSPGTLSLSPGERATLSCRASQSVSSSYLAWYQQKPGQAPRLLIYGASRRATGIPDRFSGSGSGTDFILTISRLEPEDFAVYYCQQYGTSPFTFGPGTRVDIK

SEQ ID NO: 8086 - protein, 108 aa, Homo sapiens
  REGION 1..108: note = Light chain
EIVLTQSPGTLSLSPGERATLSCRASQRAGSSYLAWYQQKSGQAPRLLIYGASSRATGIPDRFSGSGSGTDFTLTISRLEPEDFAVYYCQQYGNSPWTFGQGTKVEIK

SEQ ID NO: 8087 - protein, 107 aa, Homo sapiens
  REGION 1..107: note = Light chain
DIQMTQSPSSLSASVGDRVTITCRASQGIRNDLGWYQQKPGKAPKRLIYAASSLQSGVPSRFSGSGSGTDFTLTISSLQPEDFATYYCQQSYSTPYTFGQGTKLEIK

SEQ ID NO: 8088 - protein, 107 aa, Homo sapiens; identical to SEQ ID NO: 8008
  REGION 1..107: note = Light chain

SEQ ID NO: 8089 - protein, 112 aa, Homo sapiens; identical to SEQ ID NO: 8053
  REGION 1..112: note = Light chain

SEQ ID NO: 8090 - protein, 108 aa, Homo sapiens; identical to SEQ ID NO: 3
  REGION 1..108: note = Light chain

SEQ ID NO: 8091 - protein, 107 aa, Homo sapiens
  REGION 1..107: note = Light chain
DIQMTQSPSSLSASVGDRVTITCRASQGIRNDLGWYQQKPGKAPKRLIYAASSLQSGVPSRFSGSGSGTEFTLTISSLQPEDFATYYCLQHNSYPRTFGQGTKVEIK

SEQ ID NO: 8092 - protein, 107 aa, Homo sapiens; identical to SEQ ID NO: 8008
  REGION 1..107: note = Light chain

SEQ ID NO: 8093 - protein, 108 aa, Homo sapiens; identical to SEQ ID NO: 8086
  REGION 1..108: note = Light chain

SEQ ID NO: 8094 - protein, 107 aa, Homo sapiens
  REGION 1..107: note = Light chain
AIQMTQSPSSLSASVGDRVTITCRASQGIRNDLGWYQQKPGKAPKLLIYAASSLQSGVPSRFSGSGSGTDFTLTISSLQPEDFATYYCLQDYNYPRTFGQGTKVEIK

SEQ ID NO: 8095 - protein, 107 aa, Homo sapiens
  REGION 1..107: note = Light chain
AIQMTQSPSSLSASVGDRVTITCRASQGIRNDLGWYQQKPGKVPKLLIYAASSLQSGVPSRFSGSGSGTDFTLTISSLQPEDFATYYCLQDYNYPYTFGQGTKLEIK

SEQ ID NO: 8096 - protein, 107 aa, Homo sapiens; identical to SEQ ID NO: 8082
  REGION 1..107: note = Light chain

SEQ ID NO: 8097 - protein, 107 aa, Homo sapiens; identical to SEQ ID NO: 6
  REGION 1..107: note = Light chain

SEQ ID NO: 8098 - protein, 107 aa, Homo sapiens; identical to SEQ ID NO: 8094
  REGION 1..107: note = Light chain

SEQ ID NO: 8099 - protein, 112 aa, Homo sapiens; identical to SEQ ID NO: 8053
  REGION 1..112: note = Light chain

SEQ ID NO: 8100 - protein, 107 aa, Homo sapiens; identical to SEQ ID NO: 8008
  REGION 1..107: note = Light chain

SEQ ID NO: 8101 - protein, 107 aa, Homo sapiens
  REGION 1..107: note = Light chain
DIQMTQSPSSLSASVGDRVTITCRASQGIRNDLGWYQQKPGKAPKRLIYAASSLQSGVPSRFSGSGSGTEFTLTISSLQPEDFATYYCLQLNSYPRTFGQGTKVEIK

SEQ ID NO: 8102 - protein, 107 aa, Homo sapiens
  REGION 1..107: note = Light chain
AIQMTQSPSSLSASVGDRVTITCRASQGIRNDLGWYQQKPGKAPKLLIYAASSLQSGVPSRFSGSGSGTDFTLTISSLQPEDFATYYCLQNYNYPRTFGQGTKVEIN

SEQ ID NO: 8103 - protein, 108 aa, Homo sapiens
  REGION 1..108: note = Light chain
EIVMTQSPATLSLSPGERATLSCRASQSVSSSYLSWYQQRPGQAPRLLIYGASTRATGIPARFSGSGSGTDFTLTISSLQPEDFAVYYCQQDYNLPYTFGQGTKLEIK

SEQ ID NO: 8104 - protein, 107 aa, Homo sapiens; identical to SEQ ID NO: 8087
  REGION 1..107: note = Light chain

SEQ ID NO: 8105 - protein, 107 aa, Homo sapiens; identical to SEQ ID NO: 8082
  REGION 1..107: note = Light chain

SEQ ID NO: 8106 - protein, 107 aa, Homo sapiens; identical to SEQ ID NO: 8008
  REGION 1..107: note = Light chain

SEQ ID NO: 8107 - protein, 107 aa, Homo sapiens
  REGION 1..107: note = Light chain
DIQLTQSPSFLSASVGDRVTITCRASQGIRSYLAWYQQKPGKAPKLLIYAASTLQSGVPSRFSGSGSGTDFTLTISSLQPEDFATYYCQQYNSYPYTFGQGTKLEIK

SEQ ID NO: 8108 - protein, 107 aa, Homo sapiens
  REGION 1..107: note = Light chain
DIQMTQSPSSLSASVGDRVTITCRASQGIRNDLGWYQQKPGKAPKRLIYAASSLQSGVPSRFSGSGSGTEFTLTISSLQPEDFATYYCLQDYNYPWTFGQGTKVEIK

SEQ ID NO: 8109 - protein, 107 aa, Homo sapiens
  REGION 1..107: note = Light chain
DIQMTQSPSLLSASVGDRVTITCRASQGIRNDLGWYQQKPGKAPKRLIYAASSLQSGVPSRFSGSGSGTDFTLTISSLQPEDFATYYCQQYNSYPRTFGQGTKVEIK

SEQ ID NO: 8110 - protein, 107 aa, Homo sapiens; identical to SEQ ID NO: 6
  REGION 1..107: note = Light chain

SEQ ID NO: 8111 - protein, 108 aa, Homo sapiens
  REGION 1..108: note = Light chain
EIVLTQSPGTLSLSPGERATLSCRASQSVSSSYLAWYQQKPGQAPRLLIYGASSRATGIPDRFSGSGSGTDFTLTISRLEPEDFAVYYCQQYGSSPLTFGGGTKVEIK

SEQ ID NO: 8112 - protein, 107 aa, Homo sapiens
  REGION 1..107: note = Light chain
DIQMTQSPSSLSASVGDRVTITCRASQSISSYLNWYQQKPGKAPKLLIYAASSLQSGVPSRFSGSGSGTDFTLTISSLQPEDFATYYCLQHNSYPYTFGQGTKLEIK

SEQ ID NO: 8113 - protein, 107 aa, Homo sapiens; identical to SEQ ID NO: 6
  REGION 1..107: note = Light chain

SEQ ID NO: 8114 - protein, 107 aa, Homo sapiens; identical to SEQ ID NO: 6
  REGION 1..107: note = Light chain

SEQ ID NO: 8115 - protein, 107 aa, Homo sapiens; identical to SEQ ID NO: 8101
  REGION 1..107: note = Light chain

SEQ ID NO: 8116 - protein, 107 aa, Homo sapiens; identical to SEQ ID NO: 8108
  REGION 1..107: note = Light chain

SEQ ID NO: 8117 - protein, 107 aa, Homo sapiens; identical to SEQ ID NO: 8091
  REGION 1..107: note = Light chain

SEQ ID NO: 8118 - protein, 107 aa, Homo sapiens
  REGION 1..107: note = Light chain
DIQMTQSPSSLSASVGDRVTITCRASQSISSYLNWYQQKPGKAPKLLIYAASSLQSGVPSRFSGSGSGTDFTLTISSLQPEDFATYYCKQSYSTPYTFGQGTKLEIK

SEQ ID NO: 8119 - protein, 108 aa, Homo sapiens; identical to SEQ ID NO: 8086
  REGION 1..108: note = Light chain

SEQ ID NO: 8120 - protein, 107 aa, Homo sapiens
  REGION 1..107: note = Light chain
DIQMTQSPSSLSASVGDRVTITCRASQGIRNDLGWYQQKPGKAPKRLIYAASSLQSGVPSRFSGSGSGTEFTLTISSLQPEDFATYYCLQRNSYPWTFGQGTKVEIK

SEQ ID NO: 8121 - protein, 108 aa, Homo sapiens; identical to SEQ ID NO: 8081
  REGION 1..108: note = Light chain

SEQ ID NO: 8122 - protein, 107 aa, Homo sapiens; identical to SEQ ID NO: 8008
  REGION 1..107: note = Light chain

SEQ ID NO: 8123 - protein, 107 aa, Homo sapiens
  REGION 1..107: note = Light chain
DIQLTQSPSFLSASVGDRVTITCRASQGISSYLAWYQQKPGKAPKLLIYAASTLQSGVPSRFSGSGSGTEFTLTISSLQPEDFATYYCRQLNSYPWTFGQGTKVEIK

SEQ ID NO: 8124 - protein, 107 aa, Homo sapiens; identical to SEQ ID NO: 8109
  REGION 1..107: note = Light chain

SEQ ID NO: 8125 - protein, 107 aa, Homo sapiens
  REGION 1..107: note = Light chain
DIQMTQSPSSLSASVGDRVTITCRASQGIRNDLGWYQQKPGKAPKRLIYAASSLQSGVPSRFSGSGSGTEFTLTISSLQPEDFATYYCQQLNSYPWTFGQGTKVEIK

SEQ ID NO: 8126 - protein, 107 aa, Homo sapiens
  REGION 1..107: note = Light chain
DIQLTQSPSFLSASVGDRVTITCRASQGISSYLAWYQQKPGKAPKLLIYAASTLQSGVPSRFSGSGSGTEFTLTISSLQPEDFATYYCKQLNSYPRTFGQGTKVEIK

SEQ ID NO: 8127 - protein, 108 aa, Homo sapiens; identical to SEQ ID NO: 8081
  REGION 1..108: note = Light chain

SEQ ID NO: 8128 - protein, 107 aa, Homo sapiens; identical to SEQ ID NO: 8082
  REGION 1..107: note = Light chain

SEQ ID NO: 8129 - protein, 112 aa, Homo sapiens; identical to SEQ ID NO: 8053
  REGION 1..112: note = Light chain

SEQ ID NO: 8130 - protein, 107 aa, Homo sapiens; identical to SEQ ID NO: 8087
  REGION 1..107: note = Light chain

SEQ ID NO: 8131 - protein, 108 aa, Homo sapiens
  REGION 1..108: note = Light chain
EIVLTQSPGTLSLSPGERATLSCRASQSVSSSYLAWYQQKPGQAPRLLIYGASSRATGIPDRFSGSGSGTDCTLAISRLEPEDFAVYYCQQYGSSPWTFGQGTKVEIK

SEQ ID NO: 8132 - protein, 107 aa, Homo sapiens
  REGION 1..107: note = Light chain
DIQMTQSPSSLSASVGDRVTITCRASQGISNDLAWFQQKPGKAPKSLIYGASSLQSGVPSKFSGSGSGTDFTLTISSLQPEDFATYYCQQYNSYPYTFGQGTKLEIK

SEQ ID NO: 8133 - protein, 107 aa, Homo sapiens
  REGION 1..107: note = Light chain
DIQMTQSPSSLSASVGDRVTITCRASQDITNDLAWFQQKPGKAPKSLIYDASSLQSGVPSKFSGSGSGTDFTLTISSLQPEDFATYYCQQYKSYPYTFGLGTKLEIK

SEQ ID NO: 8134 - protein, 108 aa, Homo sapiens
  REGION 1..108: note = Light chain
EIVLTQSPGTLSLSPGERAILSCRASQSVSSNYLAWYQQKPGQAPRLLIYGASSRATGIPDRFSGSGSGTDFTLTISRLEPEDFAVYYCQQYGNSPFTFGPGTKVDIK

SEQ ID NO: 8135 - protein, 107 aa, Homo sapiens; identical to SEQ ID NO: 8133
  REGION 1..107: note = Light chain

SEQ ID NO: 8136 - protein, 108 aa, Homo sapiens
  REGION 1..108: note = Light chain
EIVLTQSPGTLSLSPGERATLSCRASQSVSSNYLAWYQQKPGQAPRLLIYGASSRATGIPDRFSGSGSGTDFTLTISRLEPEDFAVYYCQQYGSSPFTFGPGTKVDIK

SEQ ID NO: 8137 - protein, 108 aa, Homo sapiens; identical to SEQ ID NO: 8131
  REGION 1..108: note = Light chain

SEQ ID NO: 8138 - protein, 108 aa, Homo sapiens; identical to SEQ ID NO: 2
  REGION 1..108: note = Light chain

SEQ ID NO: 8139 - protein, 108 aa, Homo sapiens; identical to SEQ ID NO: 2
  REGION 1..108: note = Light chain

SEQ ID NO: 8140 - protein, 107 aa, Homo sapiens
  REGION 1..107: note = Light chain
DIQLTQSPSSLSASVGDRVTITCRVSQDISRLLNWYRQKPGEIPKLLIYRASSLQSGVPSRFSGSGSGTDFTLTISSLQPEDIATYYCQRTYSAPYTFGQGTKLEIK

SEQ ID NO: 8141 - protein, 107 aa, Homo sapiens
  REGION 1..107: note = Light chain
DIQLTQSPSFLSASVGDRVTITCRASQGINNYLAWYQQKPGKAPKLLIYAASTLQSGVPSRFSGTGSGTEFTLTISSLQPEDFATYSCQQLNNYPYTFGQGTKLEIT

SEQ ID NO: 8142 - protein, 108 aa, Homo sapiens; identical to SEQ ID NO: 8136
  REGION 1..108: note = Light chain

SEQ ID NO: 8143 - protein, 107 aa, Homo sapiens
  REGION 1..107: note = Light chain
DIQLTQSPSSLSASVGDRVTITCRVSQDISSFLNWYRQKPGDVPELLIYRSSNFQSGVPSRFSGSGSGTDFTLTISSLQPEDVATYYCQRTYNAPYTFGQGTKLEIK

SEQ ID NO: 8144 - protein, 108 aa, Homo sapiens
  REGION 1..108: note = Light chain
EIVLTQSPGTLSLSPGERATLSCRASQSVSSSYLAWYQQKPGQAPRLLIYGASSRATGIPDRFSGSGSGTDFTLTISRLEPEDFAVYYCQQFGSSPWTFGQGTKVEIK

SEQ ID NO: 8145 - protein, 108 aa, Homo sapiens; identical to SEQ ID NO: 8136
  REGION 1..108: note = Light chain

SEQ ID NO: 8146 - protein, 108 aa, Homo sapiens; identical to SEQ ID NO: 8136
  REGION 1..108: note = Light chain

SEQ ID NO: 8147 - protein, 108 aa, Homo sapiens; identical to SEQ ID NO: 8131
  REGION 1..108: note = Light chain

SEQ ID NO: 8148 - protein, 107 aa, Homo sapiens
  REGION 1..107: note = Light chain
EIVLTQSPDFQSVTPKEKVTITCRASQSIGSSLHWYQQKPDQSPKLLIKYASQSFSGVPSRFSGSGSGTDFTLTINSLEAEDAATYYCHQSSSLPFTFGPGTKVDIK

SEQ ID NO: 8149 - protein, 106 aa, Homo sapiens
  REGION 1..106: note = Light chain
EIVLTQSPDTLSLSPGERATLSCRASQSTNYLAWYQQKPGQAPRLLIYGASSRATGIPDRFSGSGSGTDFTLTISGLQPEDFAVYYCQQYGTSPWTFGQGTKVEIK

SEQ ID NO: 8150 - protein, 107 aa, Homo sapiens; identical to SEQ ID NO: 8148
  REGION 1..107: note = Light chain

SEQ ID NO: 8151 - protein, 108 aa, Homo sapiens
  REGION 1..108: note = Light chain
EIVMTQSPATLSLSPGERATLSCRASQSVSSSYLSWYQQKPGQAPRLLIHGASTRATGIPARFSGSGSGTDFTLTISSLQPEDFAVYYCQQDYNLPFTFGPGTKVDIK

SEQ ID NO: 8152 - protein, 108 aa, Homo sapiens
  REGION 1..108: note = Light chain
EIVLTQSPGTLSLSPGERATLSCRASQSISSSYLAWYQQKPGQAPRLLIYGASSRATGIPDRFSGSGSGTDFTLTISRLEPEDFAVYYCQQFGSSPFTFGPGTKVDIK

SEQ ID NO: 8153 - protein, 107 aa, Homo sapiens; identical to SEQ ID NO: 8133
  REGION 1..107: note = Light chain

SEQ ID NO: 8154 - protein, 107 aa, Homo sapiens; identical to SEQ ID NO: 8133
  REGION 1..107: note = Light chain

SEQ ID NO: 8155 - protein, 107 aa, Homo sapiens
  REGION 1..107: note = Light chain
DIQMTQSPSSLSASVGDRVTITCRASQDISNDLAWYQQKPGKVPKLLIYAASTLQSGVPSRFSGSGSGTDFTLTISSLQPKDVATYYCQKYDSAPFTFGQGTKLDIR

SEQ ID NO: 8156 - protein, 107 aa, Homo sapiens; identical to SEQ ID NO: 8141
  REGION 1..107: note = Light chain

SEQ ID NO: 8157 - protein, 108 aa, Homo sapiens; identical to SEQ ID NO: 8131
  REGION 1..108: note = Light chain

SEQ ID NO: 8158 - protein, 107 aa, Homo sapiens
  REGION 1..107: note = Light chain
DIQLTQSPSFLSAYVGDRVTITCRASQGISSFLAWYQQKPGKAPNLLIYAASTLQSGVPSRFSGTGSGTEFTLTISSLQPEDFATYYCQQLNNYPSTFGQGTKLEIK

SEQ ID NO: 8159 - protein, 107 aa, Homo sapiens; identical to SEQ ID NO: 8133
  REGION 1..107: note = Light chain

SEQ ID NO: 8160 - protein, 107 aa, Homo sapiens
  REGION 1..107: note = Light chain
DIQLTQSPSFLSASVGDRVTITCRASQGISSYLAWYQQKPGKAPKLLIYAASTLQSGVPSRFSGTGSGTEFTLTISSLQPEDFATYYCQQLNNYPCTFGQGTKLEIK

SEQ ID NO: 8161 - protein, 108 aa, Homo sapiens; identical to SEQ ID NO: 8131
  REGION 1..108: note = Light chain

SEQ ID NO: 8162 - protein, 107 aa, Homo sapiens; identical to SEQ ID NO: 8141
  REGION 1..107: note = Light chain

SEQ ID NO: 8163 - protein, 108 aa, Homo sapiens
  REGION 1..108: note = Light chain
EIVLTQSPGTLSLSPGERATLSCRASQSISSSYLAWYQQKPGQAPRLLIYGASSRATGIPDRFSGSGSGTDFTLTISRLEPEDFAVYYCQQFGRSPFTFGPGTKVDIK

SEQ ID NO: 8164 - protein, 108 aa, Homo sapiens; identical to SEQ ID NO: 8131
  REGION 1..108: note = Light chain

SEQ ID NO: 8165 - protein, 108 aa, Homo sapiens
  REGION 1..108: note = Light chain
EIVLTQSPGTLSLSPGERATLSCRASQSVSSSYLAWYQQKPGQAPRLLIYGASSRATGIPDRFSGSGSGTDFTLTISRLEPEDFAVYYCQQYGTSPFTFGHGTKVDIK

SEQ ID NO: 8166 - protein, 108 aa, Homo sapiens; identical to SEQ ID NO: 8136
  REGION 1..108: note = Light chain

SEQ ID NO: 8167 - protein, 108 aa, Homo sapiens; identical to SEQ ID NO: 2
  REGION 1..108: note = Light chain

SEQ ID NO: 8168 - protein, 107 aa, Homo sapiens; identical to SEQ ID NO: 8133
  REGION 1..107: note = Light chain

SEQ ID NO: 8169 - protein, 108 aa, Homo sapiens
  REGION 1..108: note = Light chain
EIVLTQSPGTLSLSPGERATLSCRASQSVSSSYLAWYQQKPGQAPRLLIYGASSRATGIPDRFSGSGSGTDFTLTISRLEPEDFAVYYCQQYSRSPWTFGQGTKVEIK

SEQ ID NO: 8170 - protein, 107 aa, Homo sapiens
  REGION 1..107: note = Light chain
DIQMTQSPSSLSASVGDRVTITCRASQGIGNDLAWFQQKPGKAPKSLIYGASSLQSGVPSKFSGSGSGTDFTLTISSLQPEDLATYYCQQYKTYPYTFGRGTKLEIK

SEQ ID NO: 8171 - protein, 108 aa, Homo sapiens; identical to SEQ ID NO: 8131
  REGION 1..108: note = Light chain

SEQ ID NO: 8172 - protein, 108 aa, Homo sapiens; identical to SEQ ID NO: 8152
  REGION 1..108: note = Light chain

SEQ ID NO: 8173 - protein, 108 aa, Homo sapiens; identical to SEQ ID NO: 8136
  REGION 1..108: note = Light chain

SEQ ID NO: 8174 - protein, 108 aa, Homo sapiens; identical to SEQ ID NO: 8131
  REGION 1..108: note = Light chain

SEQ ID NO: 8175 - protein, 108 aa, Homo sapiens
  REGION 1..108: note = Light chain
EIVLTQSPGTLSLSPGERATLSCRASQSVSSSYLAWYQQKPGQAPRLLIYGASSRATGIPDRFSGSGSGTDFTLTINRLEPEDFAVYYCQQYGRSPWTFGQGTKVEIK

SEQ ID NO: 8176 - protein, 107 aa, Homo sapiens; identical to SEQ ID NO: 8132
  REGION 1..107: note = Light chain

SEQ ID NO: 8177 - protein, 108 aa, Homo sapiens; identical to SEQ ID NO: 8136
  REGION 1..108: note = Light chain

SEQ ID NO: 8178 - protein, 108 aa, Homo sapiens
  REGION 1..108: note = Light chain
EIVLTQSPGTLSLSPGERATLSCRASPSISSSYLAWYQQKPGQAPRLLIYGASSRATGIPDRFSGSGSGTDFTLTISRLEPEDFAVYYCHQYGSSPFTFGPGTKVDIK

SEQ ID NO: 8179 - protein, 108 aa, Homo sapiens; identical to SEQ ID NO: 8131
  REGION 1..108: note = Light chain

SEQ ID NO: 8180 - protein, 107 aa, Homo sapiens; identical to SEQ ID NO: 8133
  REGION 1..107: note = Light chain

SEQ ID NO: 8181 - protein, 107 aa, Homo sapiens; identical to SEQ ID NO: 8132
  REGION 1..107: note = Light chain

SEQ ID NO: 8182 - protein, 108 aa, Homo sapiens; identical to SEQ ID NO: 3
  REGION 1..108: note = Light chain

SEQ ID NO: 8183 - protein, 107 aa, Homo sapiens
  REGION 1..107: note = Light chain
EIVLTQSPDFQSVTPKEKVTITCRASQNIGSSLHWYQQKPDQSPKLLIKYASQSFSGVPSRFSGSGSGTDFTLTINSLEAEDAATYYCHQSSSLPFTFGPGTKVDIK

SEQ ID NO: 8184 - protein, 107 aa, Homo sapiens
  REGION 1..107: note = Light chain
DIQMTQSPSSLSASVGDRVTITCRASQDISNDLAWYQQKPGKVPKLLIYAASTLQSGVPSRFSGSGSGTDFTLTISSLQPEDVATYYCQKYDSAPFTFGQGTKLDIR

SEQ ID NO: 8185 - protein, 107 aa, Homo sapiens; identical to SEQ ID NO: 8140
  REGION 1..107: note = Light chain

SEQ ID NO: 8186 - protein, 107 aa, Homo sapiens; identical to SEQ ID NO: 8140
  REGION 1..107: note = Light chain

SEQ ID NO: 8187 - protein, 108 aa, Homo sapiens; identical to SEQ ID NO: 8048
  REGION 1..108: note = Light chain

SEQ ID NO: 8188 - protein, 108 aa, Homo sapiens; identical to SEQ ID NO: 3
  REGION 1..108: note = Light chain

SEQ ID NO: 8189 - protein, 108 aa, Homo sapiens
  REGION 1..108: note = Light chain
EIVLTQSPGTLSLSPGERATLSCRASQSVSSNFLAWYQQKPGQAPRLLIYGASSRATGIPDRFSGSGSGTDFTLTISRLEPEDFAVYYCQQYGTSPWTFGQGTKVEIK

SEQ ID NO: 8190 - protein, 107 aa, Homo sapiens
  REGION 1..107: note = Light chain
DIQMTQSPSSLAASVGDRVTITCRASQGISNDLAWFQQKPGKAPKSLIYAASSLQSGVPSKFSGSGSGTDFTLSISSLQPEDFATYYCQQYKNYPYTFGQGTKLEIK

SEQ ID NO: 8191 - protein, 107 aa, Homo sapiens; identical to SEQ ID NO: 8143
  REGION 1..107: note = Light chain

SEQ ID NO: 8192 - protein, 107 aa, Homo sapiens; identical to SEQ ID NO: 8133
  REGION 1..107: note = Light chain

SEQ ID NO: 8193 - protein, 108 aa, Homo sapiens; identical to SEQ ID NO: 3
  REGION 1..108: note = Light chain

SEQ ID NO: 8194 - protein, 107 aa, Homo sapiens; identical to SEQ ID NO: 8140
  REGION 1..107: note = Light chain

SEQ ID NO: 8195 - protein, 107 aa, Homo sapiens
  REGION 1..107: note = Light chain
DIQLTQSPSFLSASVGDRVTITCRASQGISSFLAWYQQKPGKAPNLLIYAASTLHSGVPSRFGGTGSGTEFTLTISSLQPEDFATYYCQQLNNYPYTFGQGTKLEIK

SEQ ID NO: 8196 - protein, 108 aa, Homo sapiens; identical to SEQ ID NO: 8048
  REGION 1..108: note = Light chain

SEQ ID NO: 8197 - protein, 108 aa, Homo sapiens; identical to SEQ ID NO: 8048
  REGION 1..108: note = Light chain

SEQ ID NO: 8198 - protein, 107 aa, Homo sapiens; identical to SEQ ID NO: 8133
  REGION 1..107: note = Light chain

SEQ ID NO: 8199 - protein, 107 aa, Homo sapiens; identical to SEQ ID NO: 8132
  REGION 1..107: note = Light chain

SEQ ID NO: 8200 - protein, 108 aa, Homo sapiens; identical to SEQ ID NO: 8048
  REGION 1..108: note = Light chain

SEQ ID NO: 8201 - protein, 108 aa, Homo sapiens; identical to SEQ ID NO: 3
  REGION 1..108: note = Light chain

SEQ ID NO: 8202 - protein, 107 aa, Homo sapiens
  REGION 1..107: note = Light chain
DIQMTQSPSSLSASVGDRVTITCRASQGINNDLAWFQQKPGKAPKSLIYETSSLQSGVPSKFSGSGSGTDFTLTISSLQPEDFATYYCQQYKTYPYTFGQGTKLEIK

SEQ ID NO: 8203 - protein, 108 aa, Homo sapiens; identical to SEQ ID NO: 2
  REGION 1..108: note = Light chain

SEQ ID NO: 8204 - protein, 107 aa, Homo sapiens; identical to SEQ ID NO: 8140
  REGION 1..107: note = Light chain

SEQ ID NO: 8205 - protein, 108 aa, Homo sapiens; identical to SEQ ID NO: 8048
  REGION 1..108: note = Light chain

SEQ ID NO: 8206 - protein, 108 aa, Homo sapiens; identical to SEQ ID NO: 2
  REGION 1..108: note = Light chain

SEQ ID NO: 8207 - protein, 108 aa, Homo sapiens
  REGION 1..108: note = Light chain
EIVLTQSPGTLSLSPGERATLSCRASQSVSSNYLAWYQQKPGQAPRLLIYGASSRATGIPDRFSGSGSGTDFTLTISRLEPEDFAVYYCLRYGTSPFTFGPGTKVDIK

SEQ ID NO: 8208 - protein, 108 aa, Homo sapiens; identical to SEQ ID NO: 8151
  REGION 1..108: note = Light chain

SEQ ID NO: 8209 - protein, 107 aa, Homo sapiens
  REGION 1..107: note = Light chain
DIQMTQSPSSLSASVGDRVTITCRASQDITNDLAWFQQKPGKAPKSLIYDASSLQSGVPSKFSGSGSGTDFTLTISSLQPEDFATYYCQQYRSYPYTFGLGTKLEIK

SEQ ID NO: 8210 - protein, 108 aa, Homo sapiens; identical to SEQ ID NO: 8169
  REGION 1..108: note = Light chain

SEQ ID NO: 8211 - protein, 108 aa, Homo sapiens; identical to SEQ ID NO: 3
  REGION 1..108: note = Light chain

SEQ ID NO: 8212 - protein, 108 aa, Homo sapiens; identical to SEQ ID NO: 8189
  REGION 1..108: note = Light chain

SEQ ID NO: 8213 - protein, 107 aa, Homo sapiens
  REGION 1..107: note = Light chain
DIQMTQSPSSLSASVGDRVTITCRASQGISNDLAWFQQKPGKAPKSLIYDASSLQSGVPSKFSGSGSGTDFTLTISSLQPEDFATYYCQQYKSYPYTFGQGTKLEIK

SEQ ID NO: 8214 - protein, 107 aa, Homo sapiens; identical to SEQ ID NO: 8213
  REGION 1..107: note = Light chain

SEQ ID NO: 8215 - protein, 107 aa, Homo sapiens
  REGION 1..107: note = Light chain
DIQLTQSPSSLSASVGDRVTITCRVSQDISRLLNWYRQKPGEIPKLLIYRASSLQSGVPSRFSGSGSGTDFTLTITSLQPEDLATYYCQRTYSAPYTFGQGTKLEIK

SEQ ID NO: 8216 - protein, 108 aa, Homo sapiens
  REGION 1..108: note = Light chain
EIVLTQSPGTLSLSPGERATLSCRASQSVSGSYLAWYQQKPGQAPRLLIYGASSRATGIPDRFSGSGSGTDFTLTISRLEPEDFAVYYCQQYGSSPFTFGPGTKVDIK

SEQ ID NO: 8217 - protein, 107 aa, Homo sapiens
  REGION 1..107: note = Light chain
DIQLTQSPSFLSASVGDRVTITCRASQGISSYLAWYQQKPGKAPKLLIYAASTLQSGVPSRFSGTGSGTEFTLTISSLQPEDFATYYCQQLNNYPYTFGQGTKLEIK

SEQ ID NO: 8218 - protein, 108 aa, Homo sapiens
  REGION 1..108: note = Light chain
EIVLTQSPGTLSLSPGERATLSCRASQSVSSSYLAWYQQRPGQAPRLLIYGASSRATGIPDRFSGSGSGTDFTLTISRLEPEDFAVYYCQQYGRSPWTFGQGTKVEIK

SEQ ID NO: 8219 - protein, 108 aa, Homo sapiens; identical to SEQ ID NO: 8048
  REGION 1..108: note = Light chain

SEQ ID NO: 8220 - protein, 108 aa, Homo sapiens
  REGION 1..108: note = Light chain
EIVLTQSPGTLSLSPGERATLSCRASQSVSSSYLAWYQQKPGQAPRLLIYGASSRATDIPDRFSGSGSGTDFTLTISRLEPEDFAVYYCQQFGSSPFTFGPGTKVDIK

SEQ ID NO: 8221 - protein, 107 aa, Homo sapiens; identical to SEQ ID NO: 8132
  REGION 1..107: note = Light chain

SEQ ID NO: 8222 - protein, 107 aa, Homo sapiens; identical to SEQ ID NO: 8132
  REGION 1..107: note = Light chain

SEQ ID NO: 8223 - protein, 107 aa, Homo sapiens; identical to SEQ ID NO: 8190
  REGION 1..107: note = Light chain

SEQ ID NO: 8224 - protein, 107 aa, Homo sapiens; identical to SEQ ID NO: 8132
  REGION 1..107: note = Light chain

SEQ ID NO: 8225 - protein, 108 aa, Homo sapiens
  REGION 1..108: note = Light chain
EIVMTQSPATLSLSPGERATLSCRASQSVSSSYLSWYQQKPGQAPRLLIYGASTRATGIPARFSGSGSGTDFTLTISSLQPEDFAVYYCLQDYNLPFTFGPGTKVDIK

SEQ ID NO: 8226 - protein, 107 aa, Homo sapiens
  REGION 1..107: note = Light chain
DIQMTQSPSSLSASVGDRVTITCRASQGISNDLAWFQQKPGKAPKSLIYDASSLQSGVPSKFSGSGSGTDFTLTISSLQPEDFATYYCQQYKSYPFTFGQGTKLEIK

SEQ ID NO: 8227 - protein, 107 aa, Homo sapiens; identical to SEQ ID NO: 8132
  REGION 1..107: note = Light chain

SEQ ID NO: 8228 - protein, 107 aa, Homo sapiens; identical to SEQ ID NO: 8213
  REGION 1..107: note = Light chain

SEQ ID NO: 8229 - protein, 107 aa, Homo sapiens; identical to SEQ ID NO: 8213
  REGION 1..107: note = Light chain

SEQ ID NO: 8230 - protein, 107 aa, Homo sapiens
  REGION 1..107: note = Light chain
DIQMTQSPSSLSASLGDRVTITCRASQDISNDLAWFQQKPGKAPKSLIYETSSLQSGVPSKFSGSGSGTDFTLTISSLQPEDFASYYCQQYRSYPYTFGQGTKLEIK

SEQ ID NO: 8231 - protein, 107 aa, Homo sapiens; identical to SEQ ID NO: 8217
  REGION 1..107: note = Light chain

SEQ ID NO: 8232 - protein, 107 aa, Homo sapiens; identical to SEQ ID NO: 8213
  REGION 1..107: note = Light chain

SEQ ID NO: 8233 - protein, 108 aa, Homo sapiens; identical to SEQ ID NO: 8151
  REGION 1..108: note = Light chain

SEQ ID NO: 8234 - protein, 107 aa, Homo sapiens; identical to SEQ ID NO: 8213
  REGION 1..107: note = Light chain

SEQ ID NO: 8235 - protein, 108 aa, Homo sapiens; identical to SEQ ID NO: 8218
  REGION 1..108: note = Light chain

SEQ ID NO: 8236 - protein, 108 aa, Homo sapiens; identical to SEQ ID NO: 8151
  REGION 1..108: note = Light chain

SEQ ID NO: 8237 - protein, 107 aa, Homo sapiens; identical to SEQ ID NO: 8213
  REGION 1..107: note = Light chain

SEQ ID NO: 8238 - protein, 108 aa, Homo sapiens; identical to SEQ ID NO: 8048
  REGION 1..108: note = Light chain

SEQ ID NO: 8239 - protein, 108 aa, Homo sapiens
  REGION 1..108: note = Light chain
EIVLTQSPGTLSLSPGERATLSCRASQSVSSSYLAWYQQKPGQAPRLLIYGASSRATGIPDRFSGSGSGTDFTLTISRLEPEDFAVYYCQQYGISPFTFGPGTKVDIK

SEQ ID NO: 8240 - protein, 108 aa, Homo sapiens; identical to SEQ ID NO: 8144
  REGION 1..108: note = Light chain

SEQ ID NO: 8241 - protein, 108 aa, Homo sapiens
  REGION 1..108: note = Light chain
EIVLTQSPGTLSLSPGERATLSCRASQSGSSSYLAWYQQKPGQAPRLLIYGASSRATGIPDRFSGSGSGTDFTLTISRLEPEDFAVYYCQQYGSSPFTFGPGTKVDIK

SEQ ID NO: 8242 - protein, 108 aa, Homo sapiens; identical to SEQ ID NO: 8048
  REGION 1..108: note = Light chain

SEQ ID NO: 8243 - protein, 108 aa, Homo sapiens; identical to SEQ ID NO: 8241
  REGION 1..108: note = Light chain

SEQ ID NO: 8244 - protein, 108 aa, Homo sapiens
  REGION 1..108: note = Light chain
EIVLTQSPGTLSLSPGERATLSCRASQSVSSSYLAWYQQKPGQAPRLLIYGASSRATGIPDRFSGSGSGTDFTLTISRLEPEDFAVYYCQQYGNSPFTFGPGTKVDIK

SEQ ID NO: 8245 - protein, 112 aa, Homo sapiens
  REGION 1..112: note = Light chain
DIVMTQSPLSLPVTPGEPASISCRSSQSLLHSNGYNYLDWYLQKPGQSPQLLIYLGSNRASGVPDRFSGSGSGTDFTLKISRVEAEDVGVYYCMQSLQTPPTFGQGTKVEIK

SEQ ID NO: 8246 - protein, 108 aa, Homo sapiens
  REGION 1..108: note = Light chain
EIVLTQSPGTLSLSPGERATLSCRASQSDSSSYLAWYQQKPGQAPRPLIYGASSRATGIPDRFSGSGSGTDFTLTISRLEPEDFAVYYCQQYGRSPWTFGQGTKVEIK

SEQ ID NO: 8247 - protein, 107 aa, Homo sapiens
  REGION 1..107: note = Light chain
DIQMTQSPSSLSASVGDRVTITCRASQSISSYLSWYQRKPGKAPKLLIYAASSLQSGVPSRFSGSGSGTDFTLTISSLQPEDFATYYCQQSYSIPLTFGGGTKVEIK

SEQ ID NO: 8248 - protein, 112 aa, Homo sapiens; identical to SEQ ID NO: 8245
  REGION 1..112: note = Light chain

SEQ ID NO: 8249 - protein, 107 aa, Homo sapiens
  REGION 1..107: note = Light chain
EIVLTQSPDFQSVTPKEKVTITCRASQSIGSSLHWYQQKPDQSPKLLIKYASQSISGVPSRFSGSGSGTDFTLTINSLEAEDAAAYYCHQSSSLPFTFGPGTKVDIK

SEQ ID NO: 8250 - protein, 108 aa, Homo sapiens; identical to SEQ ID NO: 8239
  REGION 1..108: note = Light chain

SEQ ID NO: 8251 - protein, 107 aa, Homo sapiens
  REGION 1..107: note = Light chain
DIQMTQSPSSLSASVGDRVTITCRASQGISNYLAWFQQKPGKAPKSLIYAASSLQSGVPSKFSGSGSGTDFTLTISSLQPEDFATYYCQLYNSYPFTFGPGTKVDIK

SEQ ID NO: 8252 - protein, 108 aa, Homo sapiens; identical to SEQ ID NO: 8239
  REGION 1..108: note = Light chain

SEQ ID NO: 8253 - protein, 108 aa, Homo sapiens
  REGION 1..108: note = Light chain
EIVLTQSPGTLSLSPGERATLSCRASQSVSSTYLAWYQQKPGQAPRLLIYGASSRATGIPDRFSGSGSGTDFTLTISRLEPEDFAVYYCQQFGSSPFTFGPGTKLDIK

SEQ ID NO: 8254 - protein, 108 aa, Homo sapiens; identical to SEQ ID NO: 8048
  REGION 1..108: note = Light chain

SEQ ID NO: 8255 - protein, 108 aa, Homo sapiens; identical to SEQ ID NO: 8241
  REGION 1..108: note = Light chain

SEQ ID NO: 8256 - protein, 108 aa, Homo sapiens
  REGION 1..108: note = Light chain
EIVMTQSPATLSLSPGERATLSCRASQSVSSSYLSWYQQKPGQAPRLLIYGASTRATGIPARFSGSGSGTDFTLTISSLQPEDFAVYYCQQDYNLPFTFGPGTKVDIK

SEQ ID NO: 8257 - protein, 108 aa, Homo sapiens; identical to SEQ ID NO: 8241
  REGION 1..108: note = Light chain

SEQ ID NO: 8258 - protein, 108 aa, Homo sapiens; identical to SEQ ID NO: 8048
  REGION 1..108: note = Light chain

SEQ ID NO: 8259 - protein, 108 aa, Homo sapiens; identical to SEQ ID NO: 8256
  REGION 1..108: note = Light chain

SEQ ID NO: 8260 - protein, 108 aa, Homo sapiens; identical to SEQ ID NO: 8048
  REGION 1..108: note = Light chain

SEQ ID NO: 8261 - protein, 108 aa, Homo sapiens
  REGION 1..108: note = Light chain
EIVLTQSPGTLSLSPGERATLSCRASQSVSSSYLAWYQQKPGQAPRLLIYGASSRATGIPDRFSGSGSGTDFTLTISRLEPEDFAVYYCQHYGSSPWTFGQGTKVEIK

SEQ ID NO: 8262 - protein, 108 aa, Homo sapiens; identical to SEQ ID NO: 8241
  REGION 1..108: note = Light chain

SEQ ID NO: 8263 - protein, 108 aa, Homo sapiens; identical to SEQ ID NO: 8048
  REGION 1..108: note = Light chain

SEQ ID NO: 8264 - protein, 108 aa, Homo sapiens; identical to SEQ ID NO: 8144
  REGION 1..108: note = Light chain

SEQ ID NO: 8265 - protein, 108 aa, Homo sapiens; identical to SEQ ID NO: 8241
  REGION 1..108: note = Light chain

SEQ ID NO: 8266 - protein, 108 aa, Homo sapiens
  REGION 1..108: note = Light chain
EIVLTQSPGTLSLSPGERATLSCRASQSVSSSYLAWYQQKPGQAPRLLIYGASSRATGIPDRFSGSGSGTDFTLTISRLEPEDFAVYYCQQYGSSPWAFGQGTKVEIK

SEQ ID NO: 8267 - protein, 108 aa, Homo sapiens; identical to SEQ ID NO: 8239
  REGION 1..108: note = Light chain

SEQ ID NO: 8268 - protein, 108 aa, Homo sapiens; identical to SEQ ID NO: 8239
  REGION 1..108: note = Light chain

SEQ ID NO: 8269 - protein, 108 aa, Homo sapiens; identical to SEQ ID NO: 8241
  REGION 1..108: note = Light chain

SEQ ID NO: 8270 - protein, 108 aa, Homo sapiens
  REGION 1..108: note = Light chain
EIVLTQSPGTLSLSPGERATLSCRASQSVSSTYLAWYQQKPGQAPRLLIYGASSRATGIPDRFSGSGSGTDFTLTISRLEPEDFAVYYCQQLGSSPFTFGPGTKLDIK

SEQ ID NO: 8271 - protein, 108 aa, Homo sapiens; identical to SEQ ID NO: 8241
  REGION 1..108: note = Light chain

SEQ ID NO: 8272 - protein, 112 aa, Homo sapiens; identical to SEQ ID NO: 8053
  REGION 1..112: note = Light chain

SEQ ID NO: 8273 - protein, 108 aa, Homo sapiens; identical to SEQ ID NO: 8048
  REGION 1..108: note = Light chain

SEQ ID NO: 8274 - protein, 108 aa, Homo sapiens; identical to SEQ ID NO: 8048
  REGION 1..108: note = Light chain

SEQ ID NO: 8275 - protein, 108 aa, Homo sapiens; identical to SEQ ID NO: 8048
  REGION 1..108: note = Light chain

SEQ ID NO: 8276 - protein, 108 aa, Homo sapiens; identical to SEQ ID NO: 3
  REGION 1..108: note = Light chain

SEQ ID NO: 8277 - protein, 108 aa, Homo sapiens; identical to SEQ ID NO: 3
  REGION 1..108: note = Light chain

SEQ ID NO: 8278 - protein, 108 aa, Homo sapiens
  REGION 1..108: note = Light chain
EIVLTQSPGTLSLSPGERATLSCRASQTISSSYLAWYQQKPGQAPRLLIYGASSRATGIPDRFSGSGSGTDFTLTISRLEPEDFAVYYCQQYGISPFTFGPGTKVDIK

SEQ ID NO: 8279 - protein, 108 aa, Homo sapiens; identical to SEQ ID NO: 8048
  REGION 1..108: note = Light chain

SEQ ID NO: 8280 - protein, 108 aa, Homo sapiens; identical to SEQ ID NO: 8048
  REGION 1..108: note = Light chain

SEQ ID NO: 8281 - protein, 106 aa, Homo sapiens
  REGION 1..106: note = Light chain
EIVLTQSPGTLSLSPGERATLSCRASQSVSYLAWYQQKPGQAPRLLIYGASSRATGIPDRFSGSGSGTDFTLTISRLEPEDFAVYYCQHYGSSPWTFGQGTKVEIK

SEQ ID NO: 8282 - protein, 108 aa, Homo sapiens; identical to SEQ ID NO: 3
  REGION 1..108: note = Light chain

SEQ ID NO: 8283 - protein, 106 aa, Homo sapiens; identical to SEQ ID NO: 8281
  REGION 1..106: note = Light chain

SEQ ID NO: 8284 - protein, 108 aa, Homo sapiens; identical to SEQ ID NO: 3
  REGION 1..108: note = Light chain

SEQ ID NO: 8285 - protein, 108 aa, Homo sapiens; identical to SEQ ID NO: 3
  REGION 1..108: note = Light chain

SEQ ID NO: 8286 - protein, 108 aa, Homo sapiens; identical to SEQ ID NO: 3
  REGION 1..108: note = Light chain

SEQ ID NO: 8287 - protein, 108 aa, Homo sapiens; identical to SEQ ID NO: 8278
  REGION 1..108: note = Light chain

SEQ ID NO: 8288 - protein, 108 aa, Homo sapiens
  REGION 1..108: note = Light chain
EIVLTQSPGTLSLSPGERATLSCRASQSVSSSYLAWYQQKPGQAPRLLIYGASSRATGIPDRFSGSGSGTDFTLTISRLEPEDFAVYYCQQYGTSPFTFGPGTKVDIK

SEQ ID NO: 8289 - protein, 108 aa, Homo sapiens; identical to SEQ ID NO: 3
  REGION 1..108: note = Light chain

SEQ ID NO: 8290 - protein, 108 aa, Homo sapiens; identical to SEQ ID NO: 3
  REGION 1..108: note = Light chain

SEQ ID NO: 8291 - protein, 108 aa, Homo sapiens; identical to SEQ ID NO: 3
  REGION 1..108: note = Light chain

SEQ ID NO: 8292 - protein, 108 aa, Homo sapiens; identical to SEQ ID NO: 8288
  REGION 1..108: note = Light chain

SEQ ID NO: 8293 - protein, 108 aa, Homo sapiens; identical to SEQ ID NO: 3
  REGION 1..108: note = Light chain

SEQ ID NO: 8294 - protein, 108 aa, Homo sapiens; identical to SEQ ID NO: 3
  REGION 1..108: note = Light chain

SEQ ID NO: 8295 - protein, 108 aa, Homo sapiens; identical to SEQ ID NO: 8048
  REGION 1..108: note = Light chain

SEQ ID NO: 8296 - protein, 108 aa, Homo sapiens; identical to SEQ ID NO: 3
  REGION 1..108: note = Light chain

SEQ ID NO: 8297 - protein, 108 aa, Homo sapiens; identical to SEQ ID NO: 2
  REGION 1..108: note = Light chain

SEQ ID NO: 8298 - protein, 108 aa, Homo sapiens; identical to SEQ ID NO: 3
  REGION 1..108: note = Light chain

SEQ ID NO: 8299 - protein, 108 aa, Homo sapiens; identical to SEQ ID NO: 3
  REGION 1..108: note = Light chain

SEQ ID NO: 8300 - protein, 108 aa, Homo sapiens; identical to SEQ ID NO: 3
  REGION 1..108: note = Light chain

SEQ ID NO: 8301 - protein, 108 aa, Homo sapiens; identical to SEQ ID NO: 8048
  REGION 1..108: note = Light chain

SEQ ID NO: 8302 - protein, 108 aa, Homo sapiens
  REGION 1..108: note = Light chain
EIVLTQSPGTLSLSPGERATLSCRASQSVSSTYLAWYQQKPGQAPRLLIYGASSRATGIPDRFSGSGSGTDFTLTISRLEPEDFAVYYCQQFGSSPFTFGPGTKVDIK

SEQ ID NO: 8303 - protein, 108 aa, Homo sapiens; identical to SEQ ID NO: 3
  REGION 1..108: note = Light chain

SEQ ID NO: 8304 - protein, 107 aa, Homo sapiens
  REGION 1..107: note = Light chain
DIQMTQSPSSLSASVGDRVTITCRASQSISSYLNWYQQKPGKAPKLLIYAASSLLSGVPSRFSGSGSGTDFTLTISSLQPEDFATYYCQQSYSTPLTFGGGTKVEIK

SEQ ID NO: 8305 - protein, 108 aa, Homo sapiens; identical to SEQ ID NO: 3
  REGION 1..108: note = Light chain

SEQ ID NO: 8306 - protein, 107 aa, Homo sapiens
  REGION 1..107: note = Light chain
DIQMTQSPSSLSASVGDRVTITCRASQGISNYLAWFQQKPGKAPKSLIYAASSLQSGVPSKFSGSGSGTDFTLTISSLQPEDFATYYCQQYNSYPYTFGQGTKLEIK

SEQ ID NO: 8307 - protein, 108 aa, Homo sapiens
  REGION 1..108: note = Light chain
EIVLTQSPGTLSLSPGERATLSCRASQSVSSSYLAWYQQKPGQAPRLLIYGTSSRATGIPDRFSGSGSGTDFTLTISRLEPEDFAVYYCQQYGTSPWTFGQGTKVEIK

SEQ ID NO: 8308 - protein, 108 aa, Homo sapiens
  REGION 1..108: note = Light chain
EIVMTQSPATLSLSPGERATLTCRASQSGSSSYLSWYQQKAGQAPRLLIYGASTRATGIPARFSGSGSGTDFTLTISSLQPEDFAVYYCHQDYNLPYTFGQGTKLEIK

SEQ ID NO: 8309 - protein, 108 aa, Homo sapiens; identical to SEQ ID NO: 8048
  REGION 1..108: note = Light chain

SEQ ID NO: 8310 - protein, 108 aa, Homo sapiens; identical to SEQ ID NO: 3
  REGION 1..108: note = Light chain

SEQ ID NO: 8311 - protein, 108 aa, Homo sapiens; identical to SEQ ID NO: 3
  REGION 1..108: note = Light chain

SEQ ID NO: 8312 - protein, 107 aa, Homo sapiens; identical to SEQ ID NO: 8304
  REGION 1..107: note = Light chain

SEQ ID NO: 8313 - protein, 108 aa, Homo sapiens; identical to SEQ ID NO: 8278
  REGION 1..108: note = Light chain

SEQ ID NO: 8314 - protein, 106 aa, Homo sapiens; identical to SEQ ID NO: 8281
  REGION 1..106: note = Light chain

SEQ ID NO: 8315 - protein, 113 aa, Homo sapiens
  REGION 1..113: note = Light chain
DIVMTQSPDSLAVSLGERATINCKSSQSVLYRSNNKNYLAWYQQKPGQPPKVLIYWASTRESGVPDRFSGSGSGTDFTLTISSLQAEDVAVYYCHQYYSTPYTFGQGTKLEIK

SEQ ID NO: 8316 - protein, 108 aa, Homo sapiens
  REGION 1..108: note = Light chain
EIVMTQSPATLSLSPGERATLSCRASQSVSSSYLSWYQQKPGQAPRLLIYGASTRATGIPARFSGSGSGTDFTLTISSLQPEDFAVYYCQQDYNLPYTFGQGTKLEIK

SEQ ID NO: 8317 - protein, 113 aa, Homo sapiens
  REGION 1..113: note = Light chain
DIVMTQSPDSLAVSLGERATINCKSSQSVLYSSNNKNYLAWYQQKPGQPPKVLIYWASTRESGVPDRFSGSGSGTDFTLTISSLQAEDVAVYYCQQYCSTPYTFGQGTKLEIK

SEQ ID NO: 8318 - protein, 106 aa, Homo sapiens
  REGION 1..106: note = Light chain
EIVLTQSPDFQSVTPKEKVTITCRASQSIGSSLHWYQQKPDQSPKLLIKYASQSISGVPSRFSGSGSGTDFTLTINSLEAEDAAAYYCHQSSSLPTFGQGTKLEIK

SEQ ID NO: 8319 - protein, 112 aa, Homo sapiens
  REGION 1..112: note = Light chain
DIVMTQSPLSLPVTPGEPASISCRSSQSLLHSNGLNYLDWYLQKPGQSPQLLIYLGSNRASGVPDRFSGSGSGTDFTLKISRVEAEDVGVYYCMQALQTPITFGQGTRLEIK

SEQ ID NO: 8320 - protein, 111 aa, Homo sapiens
  REGION 1..111: note = Light chain
DIVMTQSPLSLPVTPGEPASISCRSSQSLLHSNGYNYLDWYLQKPGQSPQLLIYLGSNRASGVPDRFSGSGSGTDFTLKISRVEAEDVGVYYCMQSLQTITFGQGTRLEIK

SEQ ID NO: 8321 - protein, 108 aa, Homo sapiens; identical to SEQ ID NO: 8048
  REGION 1..108: note = Light chain

SEQ ID NO: 8322 - protein, 107 aa, Homo sapiens
  REGION 1..107: note = Light chain
DIQMTQSPSSLSASVGDRVTITCRASQGISNYLAWYQQKPGKVPKLLIYAASTLQSGVPSRFSGSGSGTDFTLTISSLQPEDVATYYCQKYNSAPWTFGQGTKVEIK

SEQ ID NO: 8323 - protein, 108 aa, Homo sapiens; identical to SEQ ID NO: 3
  REGION 1..108: note = Light chain

SEQ ID NO: 8324 - protein, 108 aa, Homo sapiens
  REGION 1..108: note = Light chain
EIVMTQSPATLSLSPGKRATLSCRASQSVSSSYLSWYQQKPGQAPRLLIYGASTRATGIPARFSGSGSGTNFTLTISSLQPEDFAVYYCQHVYHLPWTFGQGTKVEFK

SEQ ID NO: 8325 - protein, 108 aa, Homo sapiens; identical to SEQ ID NO: 3
  REGION 1..108: note = Light chain

SEQ ID NO: 8326 - protein, 108 aa, Homo sapiens; identical to SEQ ID NO: 3
  REGION 1..108: note = Light chain

SEQ ID NO: 8327 - protein, 108 aa, Homo sapiens; identical to SEQ ID NO: 8048
  REGION 1..108: note = Light chain

SEQ ID NO: 8328 - protein, 108 aa, Homo sapiens
  REGION 1..108: note = Light chain
EIVMTQSPATLSLSPGERATLSCRASQSVSSNYLSWYQQKPGQAPRLLIYGASTRATGIPARFSGSGSGTDFTLTISSLQPEDFAVYYCQQDYNLPLTFGGGTKVEIK

SEQ ID NO: 8329 - protein, 108 aa, Homo sapiens; identical to SEQ ID NO: 3
  REGION 1..108: note = Light chain

SEQ ID NO: 8330 - protein, 108 aa, Homo sapiens; identical to SEQ ID NO: 3
  REGION 1..108: note = Light chain

SEQ ID NO: 8331 - protein, 108 aa, Homo sapiens
  REGION 1..108: note = Light chain
EIVMTQSPATLSLPPGERATLSCRASQSFSSSYLSWYQQKPGQAPRLLIYGASTRATGIPARFSGSGSGTDFTLTISSLQPEDFAVYYCQQAYNLPYTFGQGTKLEIK

SEQ ID NO: 8332 - protein, 107 aa, Homo sapiens; identical to SEQ ID NO: 8304
  REGION 1..107: note = Light chain

SEQ ID NO: 8333 - protein, 108 aa, Homo sapiens; identical to SEQ ID NO: 3
  REGION 1..108: note = Light chain

SEQ ID NO: 8334 - protein, 108 aa, Homo sapiens; identical to SEQ ID NO: 8256
  REGION 1..108: note = Light chain

SEQ ID NO: 8335 - protein, 108 aa, Homo sapiens; identical to SEQ ID NO: 3
  REGION 1..108: note = Light chain

SEQ ID NO: 8336 - protein, 108 aa, Homo sapiens; identical to SEQ ID NO: 3
  REGION 1..108: note = Light chain

SEQ ID NO: 8337 - protein, 107 aa, Homo sapiens
  REGION 1..107: note = Light chain
DIQMTQSPSSLSASVGDRVTITCRANQGIRYDLGWYQQKPGKAPKRLISSASSLQSGVPSRFSGSGSGTEFTLTISSLQPEDFATYYCLQHNSYPFTFGPGTKVDIK

SEQ ID NO: 8338 - protein, 108 aa, Homo sapiens; identical to SEQ ID NO: 3
  REGION 1..108: note = Light chain

SEQ ID NO: 8339 - protein, 108 aa, Homo sapiens; identical to SEQ ID NO: 8278
  REGION 1..108: note = Light chain

SEQ ID NO: 8340 - protein, 108 aa, Homo sapiens; identical to SEQ ID NO: 8307
  REGION 1..108: note = Light chain

SEQ ID NO: 8341 - protein, 108 aa, Homo sapiens; identical to SEQ ID NO: 8278
  REGION 1..108: note = Light chain

SEQ ID NO: 8342 - protein, 108 aa, Homo sapiens; identical to SEQ ID NO: 3
  REGION 1..108: note = Light chain

SEQ ID NO: 8343 - protein, 108 aa, Homo sapiens
  REGION 1..108: note = Light chain
EIVMTQSPATLSLSPGERATLSCRASQTVSSIYLSWYQQKPGQAPRLLIYGSSTRATGIPARFSGSGSGTDFTLTISSLQPEDFAVYYCQQDYKLPYTFGQGTKLEIK

SEQ ID NO: 8344 - protein, 108 aa, Homo sapiens
  REGION 1..108: note = Light chain
EIVLTQSPGTLSLSPGERATLSCRASQSVSSSYLAWYQQKPGQAPRLLIYGASSRATGIPDRFSGSGSGTDFTLTISRLEPEDFAVYYCQQYGSSLWTFGQGTKVEIK

SEQ ID NO: 8345 - protein, 108 aa, Homo sapiens; identical to SEQ ID NO: 8288
  REGION 1..108: note = Light chain

SEQ ID NO: 8346 - protein, 108 aa, Homo sapiens; identical to SEQ ID NO: 2
  REGION 1..108: note = Light chain

SEQ ID NO: 8347 - protein, 108 aa, Homo sapiens; identical to SEQ ID NO: 8048
  REGION 1..108: note = Light chain

SEQ ID NO: 8348 - protein, 108 aa, Homo sapiens; identical to SEQ ID NO: 8256
  REGION 1..108: note = Light chain

SEQ ID NO: 8349 - protein, 108 aa, Homo sapiens
  REGION 1..108: note = Light chain
EIVLTQSPGTLSLSPGERATLSCRASQSVSSSYLAWYQQKPGQAPRLLIYGASSRATVIPDRFSGSGSGTDFTLTITRLEPEDFAVYYCQQYGVSPFTFGPGTKVDIK

SEQ ID NO: 8350 - protein, 108 aa, Homo sapiens
  REGION 1..108: note = Light chain
EIVLTQSPGTLSLSPGERATLSCRASQSVSSSCLAWYQQKPGQAPRLLIYGASSRATGIPDRFSGSGSGTDFTLTISRLEPEDFAVYYCQQYGISPFTFGPGTKVDIK

SEQ ID NO: 8351 - protein, 108 aa, Homo sapiens; identical to SEQ ID NO: 8350
  REGION 1..108: note = Light chain

SEQ ID NO: 8352 - protein, 108 aa, Homo sapiens; identical to SEQ ID NO: 3
  REGION 1..108: note = Light chain

SEQ ID NO: 8353 - protein, 108 aa, Homo sapiens
  REGION 1..108: note = Light chain
EIVLTQSPGTLSLSPGERATLSCRASQSVSSSYLAWYQQTPGQAPRLLIYGASSRATGIPDRFSGSGSGTDFTLTISRLEAEDFAVYYCQQYGTSPFTFGPGTIVDIK

SEQ ID NO: 8354 - protein, 108 aa, Homo sapiens; identical to SEQ ID NO: 3
  REGION 1..108: note = Light chain

SEQ ID NO: 8355 - protein, 108 aa, Homo sapiens; identical to SEQ ID NO: 3
  REGION 1..108: note = Light chain

SEQ ID NO: 8356 - protein, 108 aa, Homo sapiens; identical to SEQ ID NO: 3
  REGION 1..108: note = Light chain

SEQ ID NO: 8357 - protein, 106 aa, Homo sapiens; identical to SEQ ID NO: 8281
  REGION 1..106: note = Light chain

SEQ ID NO: 8358 - protein, 108 aa, Homo sapiens; identical to SEQ ID NO: 3
  REGION 1..108: note = Light chain

SEQ ID NO: 8359 - protein, 108 aa, Homo sapiens; identical to SEQ ID NO: 8353
  REGION 1..108: note = Light chain

SEQ ID NO: 8360 - protein, 108 aa, Homo sapiens; identical to SEQ ID NO: 3
  REGION 1..108: note = Light chain

SEQ ID NO: 8361 - protein, 112 aa, Homo sapiens
  REGION 1..112: note = Light chain
DIVMTQSPLSLPVTPGEPASISCRSSQSLLHSNGYNYLDWYLQKPGQSPQLLIYLGSNRASGVPDRFSGSGSGTDFTLKISRVEAEDVGVYYCMQTLQTPPTFGQGTKVEIK

SEQ ID NO: 8362 - protein, 108 aa, Homo sapiens; identical to SEQ ID NO: 3
  REGION 1..108: note = Light chain

SEQ ID NO: 8363 - protein, 108 aa, Homo sapiens; identical to SEQ ID NO: 8350
  REGION 1..108: note = Light chain

SEQ ID NO: 8364 - protein, 108 aa, Homo sapiens; identical to SEQ ID NO: 3
  REGION 1..108: note = Light chain

SEQ ID NO: 8365 - protein, 108 aa, Homo sapiens; identical to SEQ ID NO: 8350
  REGION 1..108: note = Light chain

SEQ ID NO: 8366 - protein, 108 aa, Homo sapiens; identical to SEQ ID NO: 8353
  REGION 1..108: note = Light chain

SEQ ID NO: 8367 - protein, 108 aa, Homo sapiens; identical to SEQ ID NO: 8350
  REGION 1..108: note = Light chain

SEQ ID NO: 8368 - protein, 108 aa, Homo sapiens; identical to SEQ ID NO: 8350
  REGION 1..108: note = Light chain

SEQ ID NO: 8369 - protein, 108 aa, Homo sapiens; identical to SEQ ID NO: 8353
  REGION 1..108: note = Light chain

SEQ ID NO: 8370 - protein, 108 aa, Homo sapiens; identical to SEQ ID NO: 8350
  REGION 1..108: note = Light chain

SEQ ID NO: 8371 - protein, 108 aa, Homo sapiens; identical to SEQ ID NO: 3
  REGION 1..108: note = Light chain

SEQ ID NO: 8372 - protein, 108 aa, Homo sapiens; identical to SEQ ID NO: 8350
  REGION 1..108: note = Light chain

SEQ ID NO: 8373 - protein, 108 aa, Homo sapiens; identical to SEQ ID NO: 8350
  REGION 1..108: note = Light chain

SEQ ID NO: 8374 - protein, 108 aa, Homo sapiens; identical to SEQ ID NO: 3
  REGION 1..108: note = Light chain

SEQ ID NO: 8375 - protein, 108 aa, Homo sapiens; identical to SEQ ID NO: 2
  REGION 1..108: note = Light chain

SEQ ID NO: 8376 - protein, 108 aa, Homo sapiens; identical to SEQ ID NO: 3
  REGION 1..108: note = Light chain

SEQ ID NO: 8377 - protein, 108 aa, Homo sapiens; identical to SEQ ID NO: 8048
  REGION 1..108: note = Light chain

SEQ ID NO: 8378 - protein, 107 aa, Homo sapiens; identical to SEQ ID NO: 8249
  REGION 1..107: note = Light chain

SEQ ID NO: 8379 - protein, 108 aa, Homo sapiens; identical to SEQ ID NO: 3
  REGION 1..108: note = Light chain

SEQ ID NO: 8380 - protein, 107 aa, Homo sapiens; identical to SEQ ID NO: 17
  REGION 1..107: note = Light chain

SEQ ID NO: 8381 - protein, 108 aa, Homo sapiens; identical to SEQ ID NO: 3
  REGION 1..108: note = Light chain

SEQ ID NO: 8382 - protein, 108 aa, Homo sapiens; identical to SEQ ID NO: 3
  REGION 1..108: note = Light chain

SEQ ID NO: 8383 - protein, 108 aa, Homo sapiens; identical to SEQ ID NO: 8048
  REGION 1..108: note = Light chain

SEQ ID NO: 8384 - protein, 108 aa, Homo sapiens; identical to SEQ ID NO: 27
  REGION 1..108: note = Light chain

SEQ ID NO: 8385 - protein, 107 aa, Homo sapiens; identical to SEQ ID NO: 17
  REGION 1..107: note = Light chain

SEQ ID NO: 8386 - protein, 108 aa, Homo sapiens; identical to SEQ ID NO: 8048
  REGION 1..108: note = Light chain

SEQ ID NO: 8387 - protein, 108 aa, Homo sapiens; identical to SEQ ID NO: 3
  REGION 1..108: note = Light chain

SEQ ID NO: 8388 - protein, 108 aa, Homo sapiens
  REGION 1..108: note = Light chain
EIVLTQSPATLSLSPGERATLSCGASQSVSSNYLAWYQQKPGLAPRLLIYDASSRATGIPDRFSGSGSGTDFTLTISRLEPEDFAMYYCQQYGGSPWTFGQGTKVEIK

SEQ ID NO: 8389 - protein, 108 aa, Homo sapiens; identical to SEQ ID NO: 3
  REGION 1..108: note = Light chain

SEQ ID NO: 8390 - protein, 108 aa, Homo sapiens; identical to SEQ ID NO: 8048
  REGION 1..108: note = Light chain

SEQ ID NO: 8391 - protein, 108 aa, Homo sapiens; identical to SEQ ID NO: 8048
  REGION 1..108: note = Light chain

SEQ ID NO: 8392 - protein, 107 aa, Homo sapiens; identical to SEQ ID NO: 6
  REGION 1..107: note = Light chain

SEQ ID NO: 8393 - protein, 112 aa, Homo sapiens
  REGION 1..112: note = Light chain
DVVMTQSPLSLPVTLGQSASISCRSSQSLVYSDGNTYLNWFQQRPGQSPRRLIYKVSNRDSGVPDRFSGSGSGTDFTLKISRVEAEDVGVYYCMQGTHWPITFGQGTRLEIK

SEQ ID NO: 8394 - protein, 108 aa, Homo sapiens; identical to SEQ ID NO: 23
  REGION 1..108: note = Light chain

SEQ ID NO: 8395 - protein, 108 aa, Homo sapiens; identical to SEQ ID NO: 3
  REGION 1..108: note = Light chain

SEQ ID NO: 8396 - protein, 112 aa, Homo sapiens; identical to SEQ ID NO: 21
  REGION 1..112: note = Light chain

SEQ ID NO: 8397 - protein, 108 aa, Homo sapiens
  REGION 1..108: note = Light chain
EIVLTQSPGTLSLSPGERATLSCRASQSVSSSYLAWYQQKPGQAPRLLIYGASSRATGIPDRFSGSGSGTDFTLTISRLEPEDFAVYYCQQYGTSPWTFGQGTKVEVK

SEQ ID NO: 8398 - protein, 107 aa, Homo sapiens; identical to SEQ ID NO: 24
  REGION 1..107: note = Light chain

SEQ ID NO: 8399 - protein, 108 aa, Homo sapiens; identical to SEQ ID NO: 8048
  REGION 1..108: note = Light chain

SEQ ID NO: 8400 - protein, 107 aa, Homo sapiens
  REGION 1..107: note = Light chain
DIQMTQSPSSLSASVGDRVTITCRASQGISNYLAWYQQKPGKVPKLLIYAASTLQSGVPSRFSGSGSGTDFTLTISSLQPEDVATYYCQKYNSAPFTFGQGTKLEIK

SEQ ID NO: 8401 - protein, 107 aa, Homo sapiens; identical to SEQ ID NO: 6
  REGION 1..107: note = Light chain

SEQ ID NO: 8402 - protein, 108 aa, Homo sapiens
  REGION 1..108: note = Light chain
EIVLTQSPGTLSLSPGERATLSCRASQSVSSNFLAWFQQKPGQAPRLLIYGASSRATGIPDRFSGSGSGTDFTLTISRLEPEDFAVYYCQHYGSSPFTFGPGTKVDIK

SEQ ID NO: 8403 - protein, 107 aa, Homo sapiens; identical to SEQ ID NO: 8014
  REGION 1..107: note = Light chain

SEQ ID NO: 8404 - protein, 107 aa, Homo sapiens; identical to SEQ ID NO: 24
  REGION 1..107: note = Light chain

SEQ ID NO: 8405 - protein, 108 aa, Homo sapiens; identical to SEQ ID NO: 2
  REGION 1..108: note = Light chain

SEQ ID NO: 8406 - protein, 107 aa, Homo sapiens; identical to SEQ ID NO: 6
  REGION 1..107: note = Light chain

SEQ ID NO: 8407 - protein, 108 aa, Homo sapiens; identical to SEQ ID NO: 8048
  REGION 1..108: note = Light chain

SEQ ID NO: 8408 - protein, 108 aa, Homo sapiens; identical to SEQ ID NO: 8048
  REGION 1..108: note = Light chain

SEQ ID NO: 8409 - protein, 107 aa, Homo sapiens; identical to SEQ ID NO: 8001
  REGION 1..107: note = Light chain

SEQ ID NO: 8410 - protein, 108 aa, Homo sapiens; identical to SEQ ID NO: 2
  REGION 1..108: note = Light chain

SEQ ID NO: 8411 - protein, 108 aa, Homo sapiens; identical to SEQ ID NO: 8256
  REGION 1..108: note = Light chain

SEQ ID NO: 8412 - protein, 108 aa, Homo sapiens
  REGION 1..108: note = Light chain
EIVLTQSPGTLSLSPGERATLSCRASQSGSSSYLAWYQQKPGQAPRLLIYGASSRATGIPDRFSGSGSGTDFTLTISRLEPEDFAVYYCQQYGTSPFTFGPGTKVDIK

SEQ ID NO: 8413 - protein, 108 aa, Homo sapiens; identical to SEQ ID NO: 8412
  REGION 1..108: note = Light chain

SEQ ID NO: 8414 - protein, 108 aa, Homo sapiens; identical to SEQ ID NO: 8048
  REGION 1..108: note = Light chain

SEQ ID NO: 8415 - protein, 108 aa, Homo sapiens; identical to SEQ ID NO: 3
  REGION 1..108: note = Light chain

SEQ ID NO: 8416 - protein, 107 aa, Homo sapiens; identical to SEQ ID NO: 11
  REGION 1..107: note = Light chain

SEQ ID NO: 8417 - protein, 108 aa, Homo sapiens; identical to SEQ ID NO: 3
  REGION 1..108: note = Light chain

SEQ ID NO: 8418 - protein, 107 aa, Homo sapiens; identical to SEQ ID NO: 8249
  REGION 1..107: note = Light chain

SEQ ID NO: 8419 - protein, 107 aa, Homo sapiens; identical to SEQ ID NO: 6
  REGION 1..107: note = Light chain

SEQ ID NO: 8420 - protein, 107 aa, Homo sapiens
  REGION 1..107: note = Light chain
DIQMTQSPSSLSASVGDRVTITCRASQGISNYLAWYQQKPGKVPKLLIYAASTLQSGVPSRFSGSGSGTDFTLTISSLQPEDVATYYCQVYNSAPYTFGQGTKLEIK

SEQ ID NO: 8421 - protein, 108 aa, Homo sapiens
  REGION 1..108: note = Light chain
EIVMTQSPATLSLSPGERATLSCRASQSVSSSYLSWYQQKPGQAPRLLIYGASTRATGIPARFSGSGSGTDFTLTISSLQPEDFAVYYCQQGYNLPFTFGPGTKVDIK

SEQ ID NO: 8422 - protein, 108 aa, Homo sapiens; identical to SEQ ID NO: 3
  REGION 1..108: note = Light chain

SEQ ID NO: 8423 - protein, 108 aa, Homo sapiens
  REGION 1..108: note = Light chain
DIQMTQSPSSLSASVGDRVTITCRASQGISNYLAWYQQKPGKVPKLLIYAASTLQSGVPSRFSGSGSGTDFTLTISSLQPEDVATYYCQKYNSAPPLTFGGGTKVEIK

SEQ ID NO: 8424 - protein, 108 aa, Homo sapiens
  REGION 1..108: note = Light chain
EIVMTQSPATLSLSPGERATLSCRASQSFSSSYLSWFQQKPGQAPRLLISGASTRATGIPARFSGSGSGTDFTLTISSLQPEDFAVYYCQQVYNLPWTFGQGTKVEIK

SEQ ID NO: 8425 - protein, 108 aa, Homo sapiens; identical to SEQ ID NO: 8256
  REGION 1..108: note = Light chain

SEQ ID NO: 8426 - protein, 108 aa, Homo sapiens; identical to SEQ ID NO: 2
  REGION 1..108: note = Light chain

SEQ ID NO: 8427 - protein, 108 aa, Homo sapiens; identical to SEQ ID NO: 2
  REGION 1..108: note = Light chain

SEQ ID NO: 8428 - protein, 108 aa, Homo sapiens; identical to SEQ ID NO: 3
  REGION 1..108: note = Light chain

SEQ ID NO: 8429 - protein, 108 aa, Homo sapiens; identical to SEQ ID NO: 2
  REGION 1..108: note = Light chain

SEQ ID NO: 8430 - protein, 108 aa, Homo sapiens
  REGION 1..108: note = Light chain
EIVLTQSPGTLSLSPGERATLSCRASQSVFSSYLAWYQQKPGQAPRLLIYGASSRATGIPDRFSGSGSGTDFTLTISRLEPEDFAVYYCQQYGTSPYTFGQGTKLEIK

SEQ ID NO: 8431 - protein, 107 aa, Homo sapiens; identical to SEQ ID NO: 24
  REGION 1..107: note = Light chain

SEQ ID NO: 8432 - protein, 108 aa, Homo sapiens; identical to SEQ ID NO: 8048
  REGION 1..108: note = Light chain

SEQ ID NO: 8433 - protein, 108 aa, Homo sapiens; identical to SEQ ID NO: 8048
  REGION 1..108: note = Light chain

SEQ ID NO: 8434 - protein, 108 aa, Homo sapiens; identical to SEQ ID NO: 8048
  REGION 1..108: note = Light chain

SEQ ID NO: 8435 - protein, 108 aa, Homo sapiens; identical to SEQ ID NO: 8256
  REGION 1..108: note = Light chain

SEQ ID NO: 8436 - protein, 108 aa, Homo sapiens; identical to SEQ ID NO: 3
  REGION 1..108: note = Light chain

SEQ ID NO: 8437 - protein, 108 aa, Homo sapiens; identical to SEQ ID NO: 8256
  REGION 1..108: note = Light chain

SEQ ID NO: 8438 - protein, 107 aa, Homo sapiens
  REGION 1..107: note = Light chain
DIQMTQSPSSLSASVGDRVTITCRASQGISNYLAWYQQKPGKVPKLLIYAASTLQSGVPSRFSGSGSGTDFTLTISSLQPEDVATYYCQEYSSAPWTFGQGTKVEIK

SEQ ID NO: 8439 - protein, 108 aa, Homo sapiens; identical to SEQ ID NO: 8048
  REGION 1..108: note = Light chain

SEQ ID NO: 8440 - protein, 108 aa, Homo sapiens
  REGION 1..108: note = Light chain
EIVMTQSPATLSLSPGERATLSCRASQSVSSSYLSWYQQKPGQAPRLLIYGASTRATGIPARFSGSGSETDFTLTISSLQPEDFAVYYCQQVYNLPFTFGPGTKVDIK

SEQ ID NO: 8441 - protein, 108 aa, Homo sapiens
  REGION 1..108: note = Light chain
EIVLTQSPGTLSLSPGERATLSCRASQSVSSSYLAWYQQKPGQAPRLLIYGASSRATGIPDRFSGSGSGTDFTLTISRLEPEDFAVYYCQKYGSSPFTFGQGTKLEIK

SEQ ID NO: 8442 - protein, 108 aa, Homo sapiens
  REGION 1..108: note = Light chain
EIVLTQSPATLSLSPGERATLSCRASQSVSSYLAWYQQKPGQAPRLLIYDASNRATGIPARFSGSGSGTDFTLTISSLEPEDFAVYYCQQRSNWPPYTFGQGTKLEIK

SEQ ID NO: 8443 - protein, 108 aa, Homo sapiens; identical to SEQ ID NO: 3
  REGION 1..108: note = Light chain

SEQ ID NO: 8444 - protein, 108 aa, Homo sapiens; identical to SEQ ID NO: 3
  REGION 1..108: note = Light chain

SEQ ID NO: 8445 - protein, 108 aa, Homo sapiens; identical to SEQ ID NO: 3
  REGION 1..108: note = Light chain

SEQ ID NO: 8446 - protein, 108 aa, Homo sapiens; identical to SEQ ID NO: 3
  REGION 1..108: note = Light chain

SEQ ID NO: 8447 - protein, 108 aa, Homo sapiens; identical to SEQ ID NO: 8048
  REGION 1..108: note = Light chain

SEQ ID NO: 8448 - protein, 108 aa, Homo sapiens
  REGION 1..108: note = Light chain
EIVMTQSPATLSLSPGERATLSCRASQSGSSSYLSWYQQKPGQAPRLLIYGASTRATGIPARFSGSGSGTDFTLTISSLQPEDFAVYYCHQDYNLPYTFGQGTKLEIK

SEQ ID NO: 8449 - protein, 106 aa, Homo sapiens; identical to SEQ ID NO: 8
  REGION 1..106: note = Light chain

SEQ ID NO: 8450 - protein, 108 aa, Homo sapiens; identical to SEQ ID NO: 3
  REGION 1..108: note = Light chain

SEQ ID NO: 8451 - protein, 108 aa, Homo sapiens; identical to SEQ ID NO: 2
  REGION 1..108: note = Light chain

SEQ ID NO: 8452 - protein, 106 aa, Homo sapiens; identical to SEQ ID NO: 8
  REGION 1..106: note = Light chain

SEQ ID NO: 8453 - protein, 108 aa, Homo sapiens; identical to SEQ ID NO: 3
  REGION 1..108: note = Light chain

SEQ ID NO: 8454 - protein, 107 aa, Homo sapiens; identical to SEQ ID NO: 16
  REGION 1..107: note = Light chain

SEQ ID NO: 8455 - protein, 108 aa, Homo sapiens
  REGION 1..108: note = Light chain
EIVLTQSPATLSLSPGERATLSCGASQSVSSSYLAWYQQKPGLAPRLLIYDTSSRATGIPDRFSGSGSGTDFTLTITRLEPEDFAVYYCQQYGRSPWTFGQGTKVEIK

SEQ ID NO: 8456 - protein, 108 aa, Homo sapiens
  REGION 1..108: note = Light chain
EIVLTQSPGTLSLSPGERATLSCRASQSVSSSYLAWYQQKPGQAPRLLIYGSSSRATGIPDRFSGSGSGTDFTLTISRLEPEDFAVYYCQHYGSSPFTFGPGTKVDIK

SEQ ID NO: 8457 - protein, 112 aa, Homo sapiens; identical to SEQ ID NO: 21
  REGION 1..112: note = Light chain

SEQ ID NO: 8458 - protein, 108 aa, Homo sapiens; identical to SEQ ID NO: 8288
  REGION 1..108: note = Light chain

SEQ ID NO: 8459 - protein, 108 aa, Homo sapiens; identical to SEQ ID NO: 8455
  REGION 1..108: note = Light chain

SEQ ID NO: 8460 - protein, 109 aa, Homo sapiens; identical to SEQ ID NO: 19
  REGION 1..109: note = Light chain

SEQ ID NO: 8461 - protein, 109 aa, Homo sapiens
  REGION 1..109: note = Light chain
EIVLTQSPGTLSLSPGERATLSCRASQSVSSSYLAWYQQKPGQAPRLLIYGASSRATGIPDRFSGSGSGTDFTLTISRLEPEDFAVYYCQQYGSSTMYTFGQGTKLEIK

SEQ ID NO: 8462 - protein, 107 aa, Homo sapiens; identical to SEQ ID NO: 8014
  REGION 1..107: note = Light chain

SEQ ID NO: 8463 - protein, 108 aa, Homo sapiens; identical to SEQ ID NO: 8288
  REGION 1..108: note = Light chain

SEQ ID NO: 8464 - protein, 106 aa, Homo sapiens; identical to SEQ ID NO: 8
  REGION 1..106: note = Light chain

SEQ ID NO: 8465 - protein, 106 aa, Homo sapiens; identical to SEQ ID NO: 8
  REGION 1..106: note = Light chain

SEQ ID NO: 8466 - protein, 106 aa, Homo sapiens; identical to SEQ ID NO: 8
  REGION 1..106: note = Light chain

SEQ ID NO: 8467 - protein, 106 aa, Homo sapiens; identical to SEQ ID NO: 8
  REGION 1..106: note = Light chain

SEQ ID NO: 8468 - protein, 108 aa, Homo sapiens; identical to SEQ ID NO: 12
  REGION 1..108: note = Light chain

SEQ ID NO: 8469 - protein, 108 aa, Homo sapiens; identical to SEQ ID NO: 3
  REGION 1..108: note = Light chain

SEQ ID NO: 8470 - protein, 106 aa, Homo sapiens; identical to SEQ ID NO: 8
  REGION 1..106: note = Light chain

SEQ ID NO: 8471 - protein, 106 aa, Homo sapiens; identical to SEQ ID NO: 8
  REGION 1..106: note = Light chain

SEQ ID NO: 8472 - protein, 108 aa, Homo sapiens; identical to SEQ ID NO: 8456
  REGION 1..108: note = Light chain

SEQ ID NO: 8473 - protein, 108 aa, Homo sapiens; identical to SEQ ID NO: 8442
  REGION 1..108: note = Light chain

SEQ ID NO: 8474 - protein, 106 aa, Homo sapiens; identical to SEQ ID NO: 8
  REGION 1..106: note = Light chain

SEQ ID NO: 8475 - protein, 108 aa, Homo sapiens; identical to SEQ ID NO: 3
  REGION 1..108: note = Light chain

SEQ ID NO: 8476 - protein, 106 aa, Homo sapiens; identical to SEQ ID NO: 8
  REGION 1..106: note = Light chain

SEQ ID NO: 8477 - protein, 107 aa, Homo sapiens
  REGION 1..107: note = Light chain
DIQMTQSPSSLSASVGDRVTITCRASQRISSYLDWYQQKPGKAPKLLIYAASSLQSGVPSRFSGSGSGTDFTLTISSLQPEDFATYYCQQSYTTPLTFGGGTKVEIE

SEQ ID NO: 8478 - protein, 106 aa, Homo sapiens; identical to SEQ ID NO: 8
  REGION 1..106: note = Light chain

SEQ ID NO: 8479 - protein, 108 aa, Homo sapiens; identical to SEQ ID NO: 12
  REGION 1..108: note = Light chain

SEQ ID NO: 8480 - protein, 108 aa, Homo sapiens; identical to SEQ ID NO: 2
  REGION 1..108: note = Light chain

SEQ ID NO: 8481 - protein, 108 aa, Homo sapiens
  REGION 1..108: note = Light chain
EIVLTQSPATLSLSPGERATLSCGASQSVNNRYLAWYQQKPGLAPRLLIYDASTRATGIPDRFSGSGSGTDFTLTISRLEPEDFAVYYCQQYGNSPWTFGQGTKVEIK

SEQ ID NO: 8482 - protein, 106 aa, Homo sapiens; identical to SEQ ID NO: 8
  REGION 1..106: note = Light chain

SEQ ID NO: 8483 - protein, 106 aa, Homo sapiens; identical to SEQ ID NO: 8
  REGION 1..106: note = Light chain

SEQ ID NO: 8484 - protein, 108 aa, Homo sapiens; identical to SEQ ID NO: 8288
  REGION 1..108: note = Light chain

SEQ ID NO: 8485 - protein, 108 aa, Homo sapiens; identical to SEQ ID NO: 3
  REGION 1..108: note = Light chain

SEQ ID NO: 8486 - protein, 108 aa, Homo sapiens; identical to SEQ ID NO: 8456
  REGION 1..108: note = Light chain

SEQ ID NO: 8487 - protein, 108 aa, Homo sapiens
  REGION 1..108: note = Light chain
EIVMTQSPATLSLSPGERATLSCRASQSVSSSYLSWYQQKPGQAPRLLIYGASTRATGIPARFSGSGSGTDFTLTISSLQPEDFAVYYCQQDYNLPLTFGGGTKVEIK

SEQ ID NO: 8488 - protein, 108 aa, Homo sapiens; identical to SEQ ID NO: 2
  REGION 1..108: note = Light chain

SEQ ID NO: 8489 - protein, 108 aa, Homo sapiens; identical to SEQ ID NO: 2
  REGION 1..108: note = Light chain

SEQ ID NO: 8490 - protein, 106 aa, Homo sapiens; identical to SEQ ID NO: 8
  REGION 1..106: note = Light chain

SEQ ID NO: 8491 - protein, 108 aa, Homo sapiens; identical to SEQ ID NO: 2
  REGION 1..108: note = Light chain

SEQ ID NO: 8492 - protein, 108 aa, Homo sapiens
  REGION 1..108: note = Light chain
EIVLTQSPGTLSLSPGERATLSCGASQSVGSNYFAWYQQKPGQAPRLLIYGASSRATGIPDRFSGSGSGTDFTLTISRLETEDFAVFYCQHYGSSPWTFGQGTKVEIK

SEQ ID NO: 8493 - protein, 108 aa, Homo sapiens; identical to SEQ ID NO: 8288
  REGION 1..108: note = Light chain

SEQ ID NO: 8494 - protein, 108 aa, Homo sapiens; identical to SEQ ID NO: 2
  REGION 1..108: note = Light chain

SEQ ID NO: 8495 - protein, 108 aa, Homo sapiens; identical to SEQ ID NO: 8455
  REGION 1..108: note = Light chain

SEQ ID NO: 8496 - protein, 122 aa, Homo sapiens
  REGION 1..122: note = Heavy chain
QVQLQESGPGLVKPSETLSLTCTVSGGSISSYYWSWIRQPLGKGLEWIAYIYYTGSTNYNPSLKSRVTMSVDTSKNQFSLELSSVTAADTAVYYCARTLRYFDWLSSFDYWGQGTLVTVSSA

SEQ ID NO: 8497 - protein, 121 aa, Homo sapiens
  REGION 1..121: note = Heavy chain
QLQLQESGGGVVRPGGSLRLSCTVSGGSISSSSYYWGWIRQPPGKGLEWIGNIYYSGNTYYNPSLKSRVTISVDTSKNQFSLKLSSVTAADTAVYYCARRRIQLWSFDYWGQGTLVTVSSA

SEQ ID NO: 8498 - protein, 121 aa, Homo sapiens; identical to SEQ ID NO: 8497
  REGION 1..121: note = Heavy chain

SEQ ID NO: 8499 - protein, 121 aa, Homo sapiens; identical to SEQ ID NO: 8497
  REGION 1..121: note = Heavy chain

SEQ ID NO: 8500 - protein, 121 aa, Homo sapiens
  REGION 1..121: note = Heavy chain
QVQLVESGGGLVKPGGSLRLSCAASGFTFSDYYMSWVRQAPGKGLEWVAVISYDGSNKYYADSVKGRFTISRDNSKNTLYLQMNSLRAEDTAVYYCARWGSGSYYNGGLLGPGNPGHRLLS

SEQ ID NO: 8501 - protein, 121 aa, Homo sapiens; identical to SEQ ID NO: 8497
  REGION 1..121: note = Heavy chain

SEQ ID NO: 8502 - protein, 121 aa, Homo sapiens; identical to SEQ ID NO: 8497
  REGION 1..121: note = Heavy chain

SEQ ID NO: 8503 - protein, 124 aa, Homo sapiens
  REGION 1..124: note = Heavy chain
QVQLQESGPGLVKPSETLSLTCTVSGGSISSYYWSWIRQPPGKGLEWIGYIYYSGSTKYNPSLKSRVTISRDNAKNSLYLQMNSLRAEDTALYHCAREGNWRNYYYYYGMDVWGQGTTVTVSSA

SEQ ID NO: 8504 - protein, 115 aa, Homo sapiens
  REGION 1..115: note = Heavy chain
EVQLVESGGGLVKPGGSLRLSCAASGFTFSNAWMSWVRQAPGKGLEWVGRIKSKTDGGTTDYAAPVKGRFTISRDDSKNTLYLQLNSLKIEDTAVYYCTIIAAAGHYWGQGTLVT

SEQ ID NO: 8505 - protein, 116 aa, Homo sapiens
  REGION 1..116: note = Heavy chain
QVQLVQSGAEVKKPGASVKVSCKASGYTFTSYGISWVRQAPGQGLEWMGWISAYNGNTNYAQKLQGRVTMTTDTSTSTAYMELRSLRSDDTAVYYCARGWPSDYWGQGTLVTVSSA

SEQ ID NO: 8506 - protein, 121 aa, Homo sapiens; identical to SEQ ID NO: 8497
  REGION 1..121: note = Heavy chain

SEQ ID NO: 8507 - protein, 117 aa, Homo sapiens
  REGION 1..117: note = Heavy chain
EVQLVESGGGVVRPGGSLRLSCAASGFTFDDYGMSWVRQAPGKGLEWVSGINWNGGSTGYADSVKGRFTISRDNAKNSLYLQMNSLRAEDTALYHCARGDVDIVATFDYWGQGTLVT

SEQ ID NO: 8508 - protein, 121 aa, Homo sapiens; identical to SEQ ID NO: 8497
  REGION 1..121: note = Heavy chain

SEQ ID NO: 8509 - protein, 121 aa, Homo sapiens
  REGION 1..121: note = Heavy chain
EVQLVESGGGVVRPGGSLRLSCAASGFTFDDYGMSWVRQAPGKGLEWVSGINWNGGSTGYADSVKGRFTISRDNAKNSLYLQMNSLRAEDTALYHCAREDNWRNYYYYYGMDVWGQGTTVT

SEQ ID NO: 8510 - protein, 121 aa, Homo sapiens; identical to SEQ ID NO: 8497
  REGION 1..121: note = Heavy chain

SEQ ID NO: 8511 - protein, 121 aa, Homo sapiens; identical to SEQ ID NO: 8497
  REGION 1..121: note = Heavy chain

SEQ ID NO: 8512 - protein, 122 aa, Homo sapiens
  REGION 1..122: note = Heavy chain
QVQLVESGGGVVQPGRSLRLSCAASGFTFSSYGMHWVRQAPGKGLEWVAVIWYDGSNKYYADSVKGRFTISRDNSKNTLYLQMNSLRAEDTAVYYCARDQEYYYGSGSSNWFDPWGQGTLVT

SEQ ID NO: 8513 - protein, 115 aa, Homo sapiens; identical to SEQ ID NO: 8504
  REGION 1..115: note = Heavy chain

SEQ ID NO: 8514 - protein, 121 aa, Homo sapiens; identical to SEQ ID NO: 8497
  REGION 1..121: note = Heavy chain

SEQ ID NO: 8515 - protein, 124 aa, Homo sapiens
  REGION 1..124: note = Heavy chain
QVQLQESGPGLVKPSETLSLTCTVSGGSISSYYWSWIRQPPGKGLEWIAYIYYTGSTNYNPSLKSRVTMSVDNAKNSLYLQMNSLRAEDTALYHCAREDNWRNYYYYYGTDVWGQGTTVTVSSA

SEQ ID NO: 8516 - protein, 122 aa, Homo sapiens
  REGION 1..122: note = Heavy chain
QVQLQESGPGLVKPSETLSLTCTVSGGSISSYYWSWIRQPLGKGLEWIAYIYYTGSTNYNPSLKSRVTMSVDTSKNQFSLELSSVTAADTAVYYCARTRRYFDWLSSFDYWGQGTLVTVSSA

SEQ ID NO: 8517 - protein, 116 aa, Homo sapiens; identical to SEQ ID NO: 8505
  REGION 1..116: note = Heavy chain

SEQ ID NO: 8518 - protein, 115 aa, Homo sapiens; identical to SEQ ID NO: 8504
  REGION 1..115: note = Heavy chain

SEQ ID NO: 8519 - protein, 122 aa, Homo sapiens
  REGION 1..122: note = Heavy chain
QVQLQESGPGLVKPSETLSLTCTVSGGSISSYYWSWIRQPLGKGLEWIAYIYYTGSTNYNPSLKSRVTMSVDTSKNQFSLELSSVTAADTAVYYCARALRYFDWLSSFDYWGQGTLVTVSSA

SEQ ID NO: 8520 - protein, 116 aa, Homo sapiens
  REGION 1..116: note = Heavy chain
QVQLVQSGAEVKKPGASVKVSCKASGYTFTSYGISWVRQALGQGLEWMGWISAYNGNTNYAQKLQGRVTMTTDTSTSTAYMELRSLRSDDTAVYYCARRWPSDYWGQGTLVTVSSA

SEQ ID NO: 8521 - protein, 122 aa, Homo sapiens
  REGION 1..122: note = Heavy chain
QVQLQESGPGLVKPSETLSLTCTVSGGSISSYYWSWIRQPLGKGLEWIAYIYYTGSTNYNPSLKSRVTMSVDTSKNQFSLELSSVTAADTAVYYCARPLRYFDWLSSFDYWGQGTLVTVSSA

SEQ ID NO: 8522 - protein, 121 aa, Homo sapiens
  REGION 1..121: note = Heavy chain
EVQLVESGGGVVRPGGSLRLSCAASGFTFDDYGMSWVRQAPGKGLEWVSGINWNGGSTGYADSVKGRFTISRDNAKNSLYLQMNSLRAEDTALYHCASEDNWRNYYYYYGMDVWGQGTTVT

SEQ ID NO: 8523 - protein, 123 aa, Homo sapiens
  REGION 1..123: note = Heavy chain
QVQLVESGGGVVQPGRSLRLSCAASGFTFSSYGMHWVRQAPGKGLEWVAVIWYDGSNKYYADSVKGRFTISRDNSKNTLYLQMNSLRAEDTAVYYCARPLTMVRGRAYFDYWGQGTLVTVSSA

SEQ ID NO: 8524 - protein, 121 aa, Homo sapiens; identical to SEQ ID NO: 8509
  REGION 1..121: note = Heavy chain

SEQ ID NO: 8525 - protein, 122 aa, Homo sapiens
  REGION 1..122: note = Heavy chain
QVQLQESGPGLVKPSETLSLTCTVSGGSISSYYWSWIRQPLGKGLEWIAYIYYTGSTNYNPSLKSRVTMSVDTSKNQFSLELSSVTAADTAVYYCARTLRYVDWLSSFDYWGQGTLVTVSSA

SEQ ID NO: 8526 - protein, 122 aa, Homo sapiens
  REGION 1..122: note = Heavy chain
QVQLQESGPGLVKPSETLSLTCTVSGGSISSYYWSWIRQPLGKGLEWIGYMYYSGSTNYNPSLKSRVTISVDTSKNQFSLKLSSVTAADTAVYYCARERYSSSWYRAFDIWGQGTMVTVSSA

SEQ ID NO: 8527 - protein, 116 aa, Homo sapiens; identical to SEQ ID NO: 8505
  REGION 1..116: note = Heavy chain

SEQ ID NO: 8528 - protein, 122 aa, Homo sapiens
  REGION 1..122: note = Heavy chain
QVQLQESGPGLVKPSETLSLTCTVSGGSISSYYWSWIRQPLGKGLEWIAYIYYTGSTNYNPSLKSRVTMSVDTSKNQFSLELSSVTAADTAVYYCASTLRYFDWLSSFDYWGQGTLVTVSSA

SEQ ID NO: 8529 - protein, 118 aa, Homo sapiens
  REGION 1..118: note = Heavy chain
QVQLQESGPGLVKPSETLSLTCTVSGGSISSYYWSWIRQPPGKGLEWIAYIYYTGSTNYNPSLKSRVTMSVDTSKNQFSLELSSVTAADTAVYYCARTVRYFDWLSSFDYWGQGTLVT

SEQ ID NO: 8530 - protein, 126 aa, Homo sapiens
  REGION 1..126: note = Heavy chain
QVQLVESGGGVVQPGRSLRLSCAASGFTFNNYGMHWVRQAPGKGLEWVTIIWHDGSNKYYADSVKGRFTISRDNSKNMLYLQMNSLRAEDTAVYYCARGRAYYYGSGSYYNFDYWGQGTLVTVSSA

SEQ ID NO: 8531 - protein, 112 aa, Homo sapiens
  REGION 1..112: note = Heavy chain
QVQLVQSGAEVKKPGASVKVSCKASGYTFTSYGISWVRQAPGQGLEWMGWISAYNGNTNYAQKLQGRVTMTTDTSTSTAYMELRSLRSDDTAVYYCARGWPYDYWGQGTLVT

SEQ ID NO: 8532 - protein, 121 aa, Homo sapiens; identical to SEQ ID NO: 8497
  REGION 1..121: note = Heavy chain

SEQ ID NO: 8533 - protein, 118 aa, Homo sapiens
  REGION 1..118: note = Heavy chain
QVQLQESGPGLVKPSETLSLTCTVSGGSISSYYWSWIRQPPGKGLEWIAYIYYTGSTNYNPSLKSRVTMSVDTSKNQFSLELSSVTAADTAVYYCAGTLRYFDWLSSFDYWGQGTLVT

SEQ ID NO: 8534 - protein, 115 aa, Homo sapiens; identical to SEQ ID NO: 8504
  REGION 1..115: note = Heavy chain

SEQ ID NO: 8535 - protein, 121 aa, Homo sapiens
  REGION 1..121: note = Heavy chain
EVQLVESGGGVVRPGGSLRLSCAASGFTFDDYGMSWVRQAPGKGLEWVSGINWNGGSTGYADSVKGRFTISRDNAKNSLYLQMNSLRAEDTALYHCAREDNWRNYYYSYGMDVWGQGTTVT

SEQ ID NO: 8536 - protein, 121 aa, Homo sapiens; identical to SEQ ID NO: 8497
  REGION 1..121: note = Heavy chain

SEQ ID NO: 8537 - protein, 121 aa, Homo sapiens; identical to SEQ ID NO: 8497
  REGION 1..121: note = Heavy chain

SEQ ID NO: 8538 - protein, 118 aa, Homo sapiens
  REGION 1..118: note = Heavy chain
QVQLQESGPGLVKPSETLSLTCTVSGGSISSYYWSWIRQPPGKGLEWIAYIYYTGSTNYNPSLKSRVTMSVDTSKNQFSLELSSVTAADTAVYYCARTLRDFDWLSSFDYWGQGTLVT

SEQ ID NO: 8539 - protein, 117 aa, Homo sapiens
  REGION 1..117: note = Heavy chain
QLQLQESGPGLVKPSETLSLTCTVSGGSISSSSYYWGWIRQPPGKGLEWIGNIYYSGNTYYNPSLKSRVTISVDTSKNQFSLKLSSVTAADTAVYYCARRRIQLWSFGYWGQGTLVT

SEQ ID NO: 8540 - protein, 121 aa, Homo sapiens; identical to SEQ ID NO: 8509
  REGION 1..121: note = Heavy chain

SEQ ID NO: 8541 - protein, 121 aa, Homo sapiens
  REGION 1..121: note = Heavy chain
EVQLVESGGGVVRPGGSLRLSCAASGFTFDDYGMSWVRQAPGKGLEWVSGINWNGGSTGYADSVKGRFTISRDNAKNSLYLQMNSLRAEDTALYHCAREDNWRKYYYYYGMDVWGQGTTVT

SEQ ID NO: 8542 - protein, 120 aa, Homo sapiens
  REGION 1..120: note = Heavy chain
QVQLVESGGGVVQPGRSLRLSCAASGFTFSSYGMHWVRQAPGKGLEWVAVIWYDGNNKHYADSVKGRFTISRDNSKNTLYLQMNSLRAEDTAVYYCARGDILTGYYGYWGQGTLVAVSSA

SEQ ID NO: 8543 - protein, 120 aa, Homo sapiens
  REGION 1..120: note = Heavy chain
QVQLVESGGGVVQPGRSLRLSCAASGFTFNSYGMHWVRQAPGKGLEWVAVIWYDGNNKHYADSVKGRFTISRDNSKNTLYLQMNSLRAEDTAVYYCVRGDILTGYYGYWGQGTLVTVSSA

SEQ ID NO: 8544 - protein, 119 aa, Homo sapiens
  REGION 1..119: note = Heavy chain
QVQLVESGGGVVQPGRSLRLSCAASGFTFSSYGIHWVRQAPGKGLEWVAVIWYDGRNKYYADSVKGRFTISRDNSKNTLYLQMNSLRAEDTAVYFCARGGQLGHFDYWGQGTLVTVSSA

SEQ ID NO: 8545 - protein, 119 aa, Homo sapiens
  REGION 1..119: note = Heavy chain
QVQLVESGGGVVQPGRSLRLSCAASGFTLSSYGMHWVRQAPGKGLEWVAVIWYDGSNKYYADSVKGRFTISRDNSKNTLYLQMSSLRAEDTAVYYCARVHQLGPFDYWGQGTLVTVSSA

SEQ ID NO: 8546 - protein, 120 aa, Homo sapiens
  REGION 1..120: note = Heavy chain
QLQLQESGPGLVKPSETLSLTCTVSGGSISSNSYYWGWIRQPPGEGLEWIGSIYYSGHTYYNPSLKSRVTISVDTPKNQFSLKLSSVTAADTAVYFCARMVRGLIINYWGQGTLVTVSSA

SEQ ID NO: 8547 - protein, 119 aa, Homo sapiens
  REGION 1..119: note = Heavy chain
QVQLVESGGGVVQPGRSLRLSCAASGFTFSTYGMHWVRLAPGKGLEWVAVIFNDGNNKYYADSVKGRFTISRDNSKNTLYLQMNSLRAEDTAMYYCARKGHLGPFDYWGQGTLVTVSSA

SEQ ID NO: 8548 - protein, 119 aa, Homo sapiens
  REGION 1..119: note = Heavy chain
QVQLVESGGGVVQPGRSLRLSCAASGFTFSSHGMHWVRQAPGKGLEWVAVTWYDGSNKYYADSVKGRFTISRDNSKNTLYLQMNSLRAEDTAVYYCARGDLRGWFDPWGQGTLVTVSSA

SEQ ID NO: 8549 - protein, 122 aa, Homo sapiens
  REGION 1..122: note = Heavy chain
QVQLVESGGGVVQPGRSLRLSCAASGFTFSSYGMHWVRQAPGKGLEWVAVIWYDGSNKYYADSVKGRFTISRDNSKNTLNLQMNSLRAEDTAVYYCAREGGSGWYEYLDLWGRGTLVSVSSA

SEQ ID NO: 8550 - protein, 120 aa, Homo sapiens
  REGION 1..120: note = Heavy chain
QVQLVESGGGVVQPGRSLRLSCAASGFTFNSYGMHWVRQAPGKGLEWVAVIWYDGNNKHYADSVKGRFTISRDNSKNTLYLQMNSLRAEDTAVYYCGRGDILTGYYGYWGQGTLVTVSSA

SEQ ID NO: 8551 - protein, 119 aa, Homo sapiens
  REGION 1..119: note = Heavy chain
QVQLVESGGGVVQPGRSLRLSCAASGFTLSRYGMHWVRQAPGKGLEWVAVTWYDGSNKNYADSVKGRFTISRDNSKNTLYLQMNSLRVEDTAVYYCTRVDWWGVFDFWGQGTLVTVSSA

SEQ ID NO: 8552 - protein, 119 aa, Homo sapiens
  REGION 1..119: note = Heavy chain
QVQLVESGGGVVQPGRSLRLSCAASGFTFRSFGMHWVRQAPGKGLEWVTAIWYDGNNKYYADSVKGRFTISRDNSKNTLYLQMNSLRAEDTAVYYCARGGQLGHFDFWGQGTLVTVSSA

SEQ ID NO: 8553 - protein, 119 aa, Homo sapiens
  REGION 1..119: note = Heavy chain
QVQLVESGGGVVQPGRSLRLSCAASGFTFSSYGMHWVRQAPGKGLEWVAVIWYDGSNKHYADSVKGRYTISRDNSKNTLYLQMNSLRAEDTALYYCARGGLIGPFDYWGQGTLVTVSSA

SEQ ID NO: 8554 - protein, 119 aa, Homo sapiens
  REGION 1..119: note = Heavy chain
QVQLVESGGGVVQPGRSLRLSCAASGFTFSRYGMHWVRQAPGKGLEWVAVIWYDGNNKYYADSVKGRFTISRDNSKNTLNLQMNSLRAEDTAVYYCARAGILTGLDYWGQGTLVTVSSA

SEQ ID NO: 8555 - protein, 119 aa, Homo sapiens; identical to SEQ ID NO: 8547
  REGION 1..119: note = Heavy chain

SEQ ID NO: 8556 - protein, 120 aa, Homo sapiens
  REGION 1..120: note = Heavy chain
QVQLVESGGGVVQPGRSLRLSCAASGFTFSSYGMHWVRQAPGKGLEWVAVIWYDGNNKHYADSVKGRFTISRDNSKNTLYLQMNSLRAEDTAVYYCARGDILTGYYSYWGQGTLVAVSSA

SEQ ID NO: 8557 - protein, 119 aa, Homo sapiens
  REGION 1..119: note = Heavy chain
QVQLVESGGGVVQPGRSLRLSCAASGFTFSSYGMNWVRQAPGKGLEWVAVIWYGGSNKYYTDSVKGRFTISRDNSKNTLYLQMNSLRAEDTAVYYCARVHLLGPFDYWGQGTLVTVSSA

SEQ ID NO: 8558 - protein, 121 aa, Homo sapiens
  REGION 1..121: note = Heavy chain
QVQLVESGGGVVQPGRSLRLSCAASGFTFSSYGMHWVRQAPGKGLEWVAVIWYDGNNRYYADSVKGRFTISRDNSKNTLYLQMNSLRAEDTAVYYCARGLLWFGESLDYWGLGTLVTVSSA

SEQ ID NO: 8559 - protein, 119 aa, Homo sapiens
  REGION 1..119: note = Heavy chain
QVQLVESGGGVVQPGRSLRLSCAASGFTFSRFGVNWVRQAPGKGLEWVAVIWYDGSNKYYADSVKGRFTISRDNSKNTLFLQMNSLRAEDTAVYYCARVPQLGPFDYWGQGTLVTVSSA

SEQ ID NO: 8560 - protein, 119 aa, Homo sapiens
  REGION 1..119: note = Heavy chain
QVQLVESGGGVVQPGRSLRLSCAASGFTLSRYGMHWVRQAPGKGLEWVAVTWYDGSNKNYADSVKGRFTISRDNSKNTLYLQMNSLRVEDTAVYYCTRVDWWGAFDFWGQGTLVTVSSA

SEQ ID NO: 8561 - protein, 122 aa, Homo sapiens
  REGION 1..122: note = Heavy chain
QVQLVESGGGVVQPGRSLRLSCAASGFTFSSYGMHWVRQAPGKGLEWVAVIWYDGSNKYYADSVKGRFTISRDNSKNTLNLQMNSLRAEDTAVYYCAREGGSGWYEYIDLWGRGTLVSVSSA

SEQ ID NO: 8562 - protein, 121 aa, Homo sapiens
  REGION 1..121: note = Heavy chain
QVQLVESGGGVVQPGRSLRLSCAASGFTFSNYCMHWVRQAPGKGLEWVAVIWYDGRNKYYADSVKGRFTISRDNSKSTLYLQMNSLRAEDTAVYYCSRGLLWFGESLDYWGQGTLVTVSSA

SEQ ID NO: 8563 - protein, 120 aa, Homo sapiens
  REGION 1..120: note = Heavy chain
QVQLVESGGGVVQPGRSLRLSCAASGFTFSSYGMHWVRQAPGKGLEWVAVIWYDGSNKYYADSVKGRFTISRDNSKNTLYLQMNSLRAEDTAVYYCARGDILTGYYDYWGQGTLVTVSSA

SEQ ID NO: 8564 - protein, 120 aa, Homo sapiens
  REGION 1..120: note = Heavy chain
QVQLVESGGGVVQPGRSLRLSCAASGFTFNSYGMHWVRQAPGKGLEWVAVIWYDGNNKHYADSVKGRFTISRDNSKNTLYLQMNSLRAEDTAVYYCVRGDILTGYYSYWGQGTLVTVSSA

SEQ ID NO: 8565 - protein, 120 aa, Homo sapiens; identical to SEQ ID NO: 8543
  REGION 1..120: note = Heavy chain

SEQ ID NO: 8566 - protein, 119 aa, Homo sapiens; identical to SEQ ID NO: 8545
  REGION 1..119: note = Heavy chain

SEQ ID NO: 8567 - protein, 120 aa, Homo sapiens; identical to SEQ ID NO: 8543
  REGION 1..120: note = Heavy chain

SEQ ID NO: 8568 - protein, 120 aa, Homo sapiens
  REGION 1..120: note = Heavy chain
QVQLVESGGGVVQPGRSLRLSCAASGFTFSSYGMHWVRQAPGKGLEWVAVIWYDGNNKHYADSVKGRFTISRDNSKNTLYLQMNSLRAEDTAVYYCARGDMLTGYYGYWGQGTLVAVSSA

SEQ ID NO: 8569 - protein, 119 aa, Homo sapiens
  REGION 1..119: note = Heavy chain
QVQLVESGGGVVQPGRSLRLSCAASGFTFSRFGVNWVRQAPGKGLEWVAVIWYDGSNKYYADSVKGRFTISRDNSKNTLFLQMNSLRAEDTAVYYCARVHQLGPFDSWGQGTLVTVSSA

SEQ ID NO: 8570 - protein, 119 aa, Homo sapiens; identical to SEQ ID NO: 8545
  REGION 1..119: note = Heavy chain

SEQ ID NO: 8571 - protein, 120 aa, Homo sapiens; identical to SEQ ID NO: 8542
  REGION 1..120: note = Heavy chain

SEQ ID NO: 8572 - protein, 120 aa, Homo sapiens
  REGION 1..120: note = Heavy chain
QVQLVESGGGVVQPGRSLRLSCAASGFTFSSYGMHWVRQAPGKGLEWVAVIWYDGNNKHYADSVKGRFTISRDNSKNTLYLQMNSLRAEDTAVYYCARGDILTGYYGSWGQGTLVAVSSA

SEQ ID NO: 8573 - protein, 119 aa, Homo sapiens
  REGION 1..119: note = Heavy chain
QVQLVESGGGVVQPGRSLRLSCAASGFTFRSFGMHWVRQAPGKGLEWVAAVWYDGSNKYFADSVKGRFTITRDNSKNTLYLQMNSLRAEDTAVYYCARGGHLGHFDYWGQGTLVTVSSA

SEQ ID NO: 8574 - protein, 120 aa, Homo sapiens; identical to SEQ ID NO: 8543
  REGION 1..120: note = Heavy chain

SEQ ID NO: 8575 - protein, 119 aa, Homo sapiens; identical to SEQ ID NO: 8544
  REGION 1..119: note = Heavy chain

SEQ ID NO: 8576 - protein, 119 aa, Homo sapiens
  REGION 1..119: note = Heavy chain
QVQLVESGGGVVQPGRSLRLSCAASGFTFSSYGMHWVRQAPGKGLEWVAVIWYDGSNKYYADSVKGRFTISRDNSKNTLYLQMNSLRAEDTAVYYCARGAILTGFDYWGQGTLVTVSSA

SEQ ID NO: 8577 - protein, 119 aa, Homo sapiens
  REGION 1..119: note = Heavy chain
QVQLVESGGGVVQPGRSLRLSCAASGFTFSSYGMHWVRQAPGKGLEWVAFIWDDGRNKYYADSVKGRFTISRDNSKNTLFLQMNSLRAEDTAVYYCARKGQLGPFDYWGQGTLVTVSSA

SEQ ID NO: 8578 - protein, 120 aa, Homo sapiens
  REGION 1..120: note = Heavy chain
QVQLVESGGGVVQPGRSLRLSCAASGFTFSSYGMHWVRQAPGKGLEWVAVIWYDGSNKYYADSVKGRFTISRDNSKNTLYLQMNSLRAEDTAVYYCARRSSSWYYFDYWGQGTLVTVSSA

SEQ ID NO: 8579 - protein, 122 aa, Homo sapiens
  REGION 1..122: note = Heavy chain
QVQLVESGGGVVQPGRSLRLSCAASGITFSSYGMHWVRQAPGKGLEWVAVIWYDGSNKYYADSVKGRFTISRDNSKNTLYLQMNSLRAEDTAVYYCAREGGSGWYEYLDLWGRGTLVTVSSA

SEQ ID NO: 8580 - protein, 119 aa, Homo sapiens; identical to SEQ ID NO: 8577
  REGION 1..119: note = Heavy chain

SEQ ID NO: 8581 - protein, 119 aa, Homo sapiens
  REGION 1..119: note = Heavy chain
QVQLVESGGGVVQPGRSLRLSCAASGFTFSSYGMHWVRQAPGKGLEWVAALWYDGSNKYYADSVKGRFTISRDNSKNTLYLQMNSLRAEDTAVYYCTRGDYFGFWDYWGQGTLVTVSSA

SEQ ID NO: 8582 - protein, 119 aa, Homo sapiens; identical to SEQ ID NO: 8577
  REGION 1..119: note = Heavy chain

SEQ ID NO: 8583 - protein, 125 aa, Homo sapiens
  REGION 1..125: note = Heavy chain
QLQLQESGPGLVKPSETLSLTCTVSGGSISSSSYYWGWIRQPPGKGLEWIGSIYYSGSTYYNPSLKSRVTISVDTSKNQFSLELSSVAAADTAVYYCARVSYYYGSGSYYFDYWGQGTLVTVSSA

SEQ ID NO: 8584 - protein, 129 aa, Homo sapiens
  REGION 1..129: note = Heavy chain
QLQLQESGPGLVKPSETLSLTCTVSGGSISSSSYYWGWIRQPPGKGLEWIGSIYYSGSTYYNPSLKSRVTISVDTSKNQFSLNLNSVTAADTAVYYCAGFYYGSGSRYYYYYYGMDVWGQGTTVTVSSA

SEQ ID NO: 8585 - protein, 122 aa, Homo sapiens
  REGION 1..122: note = Heavy chain
QVQLVESGGGVVQPGRSLRLSCAASGITFSSYGMHWVRQAPGKGLEWVAVIWYDGSNKYYADSVKGRFTISRDNSKNTLYLQMNSLRAEDTAVYYCAREGGSGWYEYIDLWGRGTLVTVSSA

SEQ ID NO: 8586 - protein, 119 aa, Homo sapiens
  REGION 1..119: note = Heavy chain
QVQLVESGGGVVQPGRSLRLSCAASGVTLSSYGMHWVRQAPGKGLEWVAVIWYDGRNKYYADSVKGRFTISRDNSKNTLYLQMNSLRAEDTAVYYCARVHQLGPFDYWGQGTLVTVSSA

SEQ ID NO: 8587 - protein, 120 aa, Homo sapiens; identical to SEQ ID NO: 8578
  REGION 1..120: note = Heavy chain

SEQ ID NO: 8588 - protein, 125 aa, Homo sapiens; identical to SEQ ID NO: 8583
  REGION 1..125: note = Heavy chain

SEQ ID NO: 8589 - protein, 119 aa, Homo sapiens
  REGION 1..119: note = Heavy chain
QVQLVESGRGIVQPGRSLRLSCAASGFTFSSYGMHWVRQSPGKGLDWVAFIWDDGINKYYADSVKGRFTISRDNSKNTLYLQMNSLRAEDTAVYYCARKGQLGSFDYWGQGTLVTVSSA

SEQ ID NO: 8590 - protein, 120 aa, Homo sapiens; identical to SEQ ID NO: 8578
  REGION 1..120: note = Heavy chain

SEQ ID NO: 8591 - protein, 125 aa, Homo sapiens; identical to SEQ ID NO: 8583
  REGION 1..125: note = Heavy chain

SEQ ID NO: 8592 - protein, 120 aa, Homo sapiens
  REGION 1..120: note = Heavy chain
QVQLVESGGGVVQPGRSLRLSCAASGFTFSSYGMHWVRQAPGKGLEWVAVIWYDGSNKYYADSVKGRFTISRDNSKNTLYLQMNSLRAEDTAVYYCARRSSSWYYFYYWGQGTLVTVSSA

SEQ ID NO: 8593 - protein, 119 aa, Homo sapiens
  REGION 1..119: note = Heavy chain
QVQLVESGGGVVQPGRSLRLSCAASGFTFSSYGMHWVRQAPGKGLEWVAVIWYDGSNKYYADSVKGRFTISRDNSKNTLYLQMNSLRAEDTAVYYCARGAILTGFDSWGQGTLVTVSSA

SEQ ID NO: 8594 - protein, 125 aa, Homo sapiens; identical to SEQ ID NO: 8583
  REGION 1..125: note = Heavy chain

SEQ ID NO: 8595 - protein, 122 aa, Homo sapiens
  REGION 1..122: note = Heavy chain
QVQLVESGGGVVQPGRSLRLSCAASGITFSSYGMHWVRQAPGKGLEWVAVIWYDGSNKYYADSVKGRFTISRDNSKNTLYLQMNSLRAEDTAVYYCARDGGSGWYEYLDLWGRGTLVTVSSA

SEQ ID NO: 8596 - protein, 120 aa, Homo sapiens; identical to SEQ ID NO: 8578
  REGION 1..120: note = Heavy chain

SEQ ID NO: 8597 - protein, 120 aa, Homo sapiens; identical to SEQ ID NO: 8578
  REGION 1..120: note = Heavy chain

SEQ ID NO: 8598 - protein, 118 aa, Homo sapiens
  REGION 1..118: note = Heavy chain
QVQLVESGGGVVQPGRSLRLSCAASGFTFSSYNMHWVRQAPGKGLEWVAVIGYDGSDKYYADSVKGRFTISRDNSKNTLYLQMNSLRAEDTAVYYCAREKHWFFDLWGRGTLVTVSSA

SEQ ID NO: 8599 - protein, 125 aa, Homo sapiens; identical to SEQ ID NO: 8583
  REGION 1..125: note = Heavy chain

SEQ ID NO: 8600 - protein, 125 aa, Homo sapiens
  REGION 1..125: note = Heavy chain
QLQLQESGPGLVKPSETLSLTCTVSGGSISSSSYYWGWIRQPPGKGLEWIGSIYYSGSTYYNPSLKSRVTISVDTSKNQFSLELSSVAAADTAVYYCARVSYSYGSGSYYFDYWGQGTLVTVSSA

SEQ ID NO: 8601 - protein, 120 aa, Homo sapiens
  REGION 1..120: note = Heavy chain
QVQLVESGGGVVQPGRSLRLSCAASGFTFSSYGMHWVRQAPGKGLEWVAVIWYDGSNKYYADSVKGRFTISRDNSKNTLYLQMNSLRAEDTAVYYCARRSSGWYYFDYWGQGTLVTVSSA

SEQ ID NO: 8602 - protein, 121 aa, Homo sapiens
  REGION 1..121: note = Heavy chain
EVQLVESGGGLVQPGRSLRLSCTASGFTFGDYVVSWFRQAPGKGLEWVGFIRRKAYGGTTAYAASVKGRFSISRDDSKNIAYLQMNSLKTEDTAVYYCTRSGWYWYFDLWGRGTLVTVSSA

SEQ ID NO: 8603 - protein, 124 aa, Homo sapiens
  REGION 1..124: note = Heavy chain
EVQLVESGPGLVKPSETLSPTCTVSGGSISSYYWSWIRQPPGKGLEWIGYIYYSGSTNYNPSLKSRVTISVDTSKNQLSLKLSSVTAADTALYHCAREDNWRNYYYYYGMDVWGQGTTVTVSSA

SEQ ID NO: 8604 - protein, 125 aa, Homo sapiens; identical to SEQ ID NO: 8583
  REGION 1..125: note = Heavy chain

SEQ ID NO: 8605 - protein, 125 aa, Homo sapiens; identical to SEQ ID NO: 8583
  REGION 1..125: note = Heavy chain

SEQ ID NO: 8606 - protein, 119 aa, Homo sapiens
  REGION 1..119: note = Heavy chain
QVQLVESGGGVVQPGRSLRLSCAASGFTFSSYGMHWVRQAPGKGLEWVAVIWYDGSNKYYADSVKGRFTISRDNSKNTLYLQMNSLRAEDTAVYYCARGAIFTGFDYWGQGTLVTVSSA

SEQ ID NO: 8607 - protein, 129 aa, Homo sapiens; identical to SEQ ID NO: 8584
  REGION 1..129: note = Heavy chain

SEQ ID NO: 8608 - protein, 125 aa, Homo sapiens; identical to SEQ ID NO: 8583
  REGION 1..125: note = Heavy chain

SEQ ID NO: 8609 - protein, 119 aa, Homo sapiens; identical to SEQ ID NO: 8577
  REGION 1..119: note = Heavy chain

SEQ ID NO: 8610 - protein, 119 aa, Homo sapiens
  REGION 1..119: note = Heavy chain
QVQLVESGGGVVQPGRSLRLSCAASGFTFSSYGMHWVRQAPGKGLEWVAVIWYDGSNKYYADSVKGRFTISRDNSKNTLYLQMNSLRAEDTAVYYCARGAILTGFDVWGQGTTVTVSSA

SEQ ID NO: 8611 - protein, 120 aa, Homo sapiens
  REGION 1..120: note = Heavy chain
QVQLVESGGGVVQPGRSLRLSCAASGFTFSSYGMHWVRQAPGKGLEWVAVIWYDGSNKYYADSVKGRFTISRDNSKNTLYLQMNSLRAEDTAVYYCARGSSRYWYFDLWGRGTLVTVSSA

SEQ ID NO: 8612 - protein, 120 aa, Homo sapiens; identical to SEQ ID NO: 8578
  REGION 1..120: note = Heavy chain

SEQ ID NO: 8613 - protein, 120 aa, Homo sapiens; identical to SEQ ID NO: 8601
  REGION 1..120: note = Heavy chain

SEQ ID NO: 8614 - protein, 125 aa, Homo sapiens; identical to SEQ ID NO: 8583
  REGION 1..125: note = Heavy chain

SEQ ID NO: 8615 - protein, 119 aa, Homo sapiens
  REGION 1..119: note = Heavy chain
QVQLVESGRGIVQPGRSLRLSCAASGFTFSSYGMHWVRQSPGKGLDWVAFIWDDGKNKYYADSVKGRFTISRDNSKNTLYLQMNSLRAEDTAVYYCARKGQLGPFDSWGQGTLVTVSSA

SEQ ID NO: 8616 - protein, 120 aa, Homo sapiens; identical to SEQ ID NO: 8578
  REGION 1..120: note = Heavy chain

SEQ ID NO: 8617 - protein, 119 aa, Homo sapiens; identical to SEQ ID NO: 8615
  REGION 1..119: note = Heavy chain

SEQ ID NO: 8618 - protein, 125 aa, Homo sapiens; identical to SEQ ID NO: 8600
  REGION 1..125: note = Heavy chain

SEQ ID NO: 8619 - protein, 120 aa, Homo sapiens; identical to SEQ ID NO: 8578
  REGION 1..120: note = Heavy chain

SEQ ID NO: 8620 - protein, 120 aa, Homo sapiens; identical to SEQ ID NO: 8578
  REGION 1..120: note = Heavy chain

SEQ ID NO: 8621 - protein, 125 aa, Homo sapiens; identical to SEQ ID NO: 8583
  REGION 1..125: note = Heavy chain

SEQ ID NO: 8622 - protein, 129 aa, Homo sapiens; identical to SEQ ID NO: 8584
  REGION 1..129: note = Heavy chain

SEQ ID NO: 8623 - protein, 119 aa, Homo sapiens
  REGION 1..119: note = Heavy chain
QVQLVESGGGVVQPGRSLRLSCAASGFTFSSYGMHWVRQAPGKGLEWVAFIWDDGRNKYYADSVKGRFTISRDNSKNTLFLQMNSLRAEDTAVYYCARNGQLGPFDYWGQGTLVTVSSA

SEQ ID NO: 8624 - protein, 130 aa, Homo sapiens
  REGION 1..130: note = Heavy chain
QLQLQESGPGLVKPSETLSLTCTVSGGSISSSSYYWGWIRQPPGKGLEWIGSIYYSGSTYYNPSLKSRVTISVDTSKNQFSLKLSSVTAADTAVYYCAGYYYGSGSPLYYYYYYGMDVWGQGTTVTVSSA

SEQ ID NO: 8625 - protein, 119 aa, Homo sapiens; identical to SEQ ID NO: 8577
  REGION 1..119: note = Heavy chain

SEQ ID NO: 8626 - protein, 120 aa, Homo sapiens; identical to SEQ ID NO: 8578
  REGION 1..120: note = Heavy chain

SEQ ID NO: 8627 - protein, 119 aa, Homo sapiens
  REGION 1..119: note = Heavy chain
QVQLVESGGGVVQPGRSLRLSCAASGFTFSSYGIHWVRQAPGKGLEWVAVIWYDGRNKYYADSVKGRFTISRDNSKNTLYLQMNSLRAEDTAVYYCARAGNWGPFDYWGQGTLVTVSSA

SEQ ID NO: 8628 - protein, 119 aa, Homo sapiens
  REGION 1..119: note = Heavy chain
EVQLVESGGGVVRPGGSLRLSCAASGFTFDDYGMSWVRQAPGKGLEWVSGINWNGGSTGYADSVKGRFAISRDNAKNSLYLQMNSLRAEDTALYHCVRDGWELLGDYWGQGTLVTVSSA

SEQ ID NO: 8629 - protein, 119 aa, Homo sapiens
  REGION 1..119: note = Heavy chain
EVQLVESGGGVVRPGGSLRLSCAASGFTFDDYGMSWVRQAPGKGLEWVSGINWNGGSTGYVDSVKGRFIISRDNAKNSLYLQMNSLRAEDTALYYCARDGWKLLDDYWGQGTLVTVSSA

SEQ ID NO: 8630 - protein, 117 aa, Homo sapiens
  REGION 1..117: note = Heavy chain
QVQLVQSGAEEKKPGAAVKVSCKASGYTFTSYGISWVRQAPGQGLEWMGWISAYNGNTHYAQKFQGRVTMTTDTSTSTAYMELRSLRSDDTAVYYCARVGPPFDYWGQGTLVTVSSA

SEQ ID NO: 8631 - protein, 119 aa, Homo sapiens
  REGION 1..119: note = Heavy chain
EVQLVESGGYVVRPGGSLRLSCAASGFAFDDFGMSWVRQPPGKGLEWVSGINWNGGNTGYVDSVKGRFIISRDNAKNSLYLQMNSLRAEDTALYYCVRDGWKLLDDYWGQGTLVTVSSA

SEQ ID NO: 8632 - protein, 119 aa, Homo sapiens
  REGION 1..119: note = Heavy chain
QVQLVQSGAEVKKPGASVKVSCKASGYTFTSYGISWVRQAPGQGLEWMGWISAYNGNTNYAQKLQGRVTMTTDTSTSTAYMELRSLRSDDTAVYYCARITGPYAFDIWGQGTKVTVSSA

SEQ ID NO: 8633 - protein, 118 aa, Homo sapiens
  REGION 1..118: note = Heavy chain
QVQLVQSGAEVKKPGASVKVSCKASGYTFTSYGISWVRQAPGQGLEWMGWISVYNGNTNYAQKLQGRVTMTTDTSTSTAYMELRSLRSDDTAVYYCARVGANWFDPWGQGTLVTVSSA

SEQ ID NO: 8634 - protein, 119 aa, Homo sapiens
  REGION 1..119: note = Heavy chain
QVQLVESGGGVVQPGRSLRLSCAASGFTFSSHGMDWVRQAPGKGLEWVAVIWYDGRNKYYADSVKGRFTISRDNSKNTLYLQMNSLRVEDTAVYYCARGGLIGGFDYWGQGTLVTVSSA

SEQ ID NO: 8635 - protein, 119 aa, Homo sapiens
  REGION 1..119: note = Heavy chain
QVQLVESGGGVVQPGRSLRLSCTASGFTFSSYGMDWVRQAPGKGLEWVAVIWYDGRNKYYADSVKGRFTISGDSSKNTLYLQMNSLRAEDTAVYYCARGGLLGGFDYWGQGTLVTVSSA

SEQ ID NO: 8636 - protein, 124 aa, Homo sapiens
  REGION 1..124: note = Heavy chain
QVQLVQSGAEVQKPGASVKVSCKASGYTFTSYYMHWVRQAPGQGLEWMGIINPSGGSSNYAQKFLGRVTMTRDTSTSTVYMELSGLRSEDTAVYYCARDPPITMVRGAPFDYWGQGTLVTVSSA

SEQ ID NO: 8637 - protein, 121 aa, Homo sapiens
  REGION 1..121: note = Heavy chain
QVQLVESGGGVVQPGRSLRLSCAASGFTFRGYGMHWVRQAPGKGLEWVAVIWNDGSNKYYADSVKGRFTISRDNSKNTLYLQMNSLRAEDTAVYYCARTYNWNDVGWDYWGQGTLVTVSSA

SEQ ID NO: 8638 - protein, 119 aa, Homo sapiens; identical to SEQ ID NO: 8635
  REGION 1..119: note = Heavy chain

SEQ ID NO: 8639 - protein, 124 aa, Homo sapiens; identical to SEQ ID NO: 8636
  REGION 1..124: note = Heavy chain

SEQ ID NO: 8640 - protein, 119 aa, Homo sapiens
  REGION 1..119: note = Heavy chain
QVQLVESGGGVVQPGRSLRLSCAASGFTFSSYGIHWVRQAPGKGLEWVAVILYDGSNKFYADSVKGRFTISRDNSKNTLYLQMNSLRAEDTAVYYCARGGLTGPFDYWGQGTLVTVSSA

SEQ ID NO: 8641 - protein, 119 aa, Homo sapiens
  REGION 1..119: note = Heavy chain
QVQLVESGGGVVQPGRSLRLSCAASGFTFSSYGIHWVRQAPGKGLEWVAVIWYDGSNKFYADSVKGRFTISRDTSKNTLYLQMNSLRAEDTAVYYCARGGIWGYFDYWGQGTLVTVSSA

SEQ ID NO: 8642 - protein, 119 aa, Homo sapiens
  REGION 1..119: note = Heavy chain
QVQLVESGGGVVQPGRSLRLSCAASGFTFNSYGMHWVRQAPGKGLEWVAVIWYDGSNKHYADSVEGRFTISRDNSKNTLYLQMNSLRAEDTAVYYCVRGGIWGYFDYWGQGTLVTVSSA

SEQ ID NO: 8643 - protein, 119 aa, Homo sapiens
  REGION 1..119: note = Heavy chain
QVQLVESGGGVVQPGRSLRLSCAASGFTFSNYGMHWVRQAPGKGLEWVAVIFYDGSNKYYADSVKGRFTISRDNSKNTLYLQMNSLRAEDTAVYYCARVGLLGGMDVWGQGTTVTVSSA

SEQ ID NO: 8644 - protein, 118 aa, Homo sapiens
  REGION 1..118: note = Heavy chain
QVQLVQSGPEVKKPGASVKVSCKASGYTFTNYGIGWVRQAPGQGLEWMGWISAYNGNTNYVQKFQGRVTMTTDPSTSTAYMALRSLRSDDTAVYYCARVGASGVDYWGQGTLVTVSSA

SEQ ID NO: 8645 - protein, 119 aa, Homo sapiens; identical to SEQ ID NO: 8627
  REGION 1..119: note = Heavy chain

SEQ ID NO: 8646 - protein, 118 aa, Homo sapiens
  REGION 1..118: note = Heavy chain
QVQLVQSGPEVKKPGASVKVSCKASGYTFTSYGIGWVRQAPGQGLEWMGWISAYNGNTNYVQKFQGRVTMTTDTSTNTAYMELRSPRSDDTAVYYCARVGSSGVDYWGQGTLVTVSSA

SEQ ID NO: 8647 - protein, 120 aa, Homo sapiens
  REGION 1..120: note = Heavy chain
QVQLVQSGAEVKKPGASVKVSCKASGYTFTNYGISWVRQAPGQGLEWMGWISAYNGNTNYAQKFQGRVTMTTDTSTSTAYMELRSLRSDDTAVYYCARGPSGPYEGDYWGQGTLVTVSSA

SEQ ID NO: 8648 - protein, 119 aa, Homo sapiens
  REGION 1..119: note = Heavy chain
QVQLVESGGGVVQPGRSLRISCAASGFTFSSYGIHWVRQAPGKGLEWVAVIWYDGRNKHYADSVKGRFTISRDNSKNTLYLQMNSLRAEDTAVYYCARAGILGGMDVWGQGTTVTVSSA

SEQ ID NO: 8649 - protein, 119 aa, Homo sapiens
  REGION 1..119: note = Heavy chain
EVQLVESGGGVVRPGGSLRLSCAASGFSFDDFGMSWVRQAPGKGLEWVSGINWNGGSTGYADSVKGRFTISRDNAKNSLYLQMNSLRAEDTALYHCTRDGWRLLDDYWGQGTLVTVSSA

SEQ ID NO: 8650 - protein, 119 aa, Homo sapiens; identical to SEQ ID NO: 8628
  REGION 1..119: note = Heavy chain

SEQ ID NO: 8651 - protein, 117 aa, Homo sapiens
  REGION 1..117: note = Heavy chain
EVQLVESGGDLVKPGGSLRLSCAASGFTFSYAWMSWVRQAPGKGLEWIGRIKSKTDGGTIDYAAPVKDRFIISRDDSKNTLYLQMNSLKTEDSAVYYCTEERMDYWGQGTLVTVSSA

SEQ ID NO: 8652 - protein, 121 aa, Homo sapiens
  REGION 1..121: note = Heavy chain
QVQLVESGGGVVQPGGSLRLSCAASGFTFRGYGMHWVRQAPGKGLEWVAIIWNDGSNRYYADSVKGRFTISRDNSKNTLYLQMNSLRAEDTAVYYCTRTYTWNDVGWDYWGQGTLVTVSSA

SEQ ID NO: 8653 - protein, 119 aa, Homo sapiens
  REGION 1..119: note = Heavy chain
QVQLVESGGGVVQPGRSLRLSCAASGFTFSSYGIHWVRQAPGKGLEWVAVIWYDGSNKHYADSVRGRFTISRDNSKNTLYLQMNSLRAEDTAIYYCARAGIWGPFDYWGQGTLVTVSSA

SEQ ID NO: 8654 - protein, 121 aa, Homo sapiens
  REGION 1..121: note = Heavy chain
QVQLVESGGGVVQPGRSLRLSCSASGFTFRGYGMHWVRQAPGKGLEWVAIIWNDGSNKYYADSVKGRFTISRDNSKNTLYLQMNSLRAEDTAVYYCARTYTWNDVGWDYWGQGTLVTVSSA

SEQ ID NO: 8655 - protein, 119 aa, Homo sapiens
  REGION 1..119: note = Heavy chain
EVQLVESGGGVVRPGGSLRLSCAASGFSFDDYGMSWVRQAPGKGLEWVSGINWNGGSTGYADSVKGRFTVSRDNAKKSLYLQMNSLRAEDTALYYCARDGWRLLDDYWGQGTLVTVSSA

SEQ ID NO: 8656 - protein, 121 aa, Homo sapiens; identical to SEQ ID NO: 8637
  REGION 1..121: note = Heavy chain

SEQ ID NO: 8657 - protein, 119 aa, Homo sapiens
  REGION 1..119: note = Heavy chain
QVQLVESGGGVVQPGRSLRLSCAASGFTFSSFGMHWVRQAPGKGLEWVAVIWYDGSNRFYADSVKGRFTLSRDNSKNTLFLQMNSLRAEDTAVYYCARGGHYGPFDYWGQGTLVTVSSA

SEQ ID NO: 8658 - protein, 121 aa, Homo sapiens; identical to SEQ ID NO: 8654
  REGION 1..121: note = Heavy chain

SEQ ID NO: 8659 - protein, 119 aa, Homo sapiens; identical to SEQ ID NO: 8648
  REGION 1..119: note = Heavy chain

SEQ ID NO: 8660 - protein, 129 aa, Homo sapiens
  REGION 1..129: note = Heavy chain
QVQLVESGGGVVQPGRSRRLSCAASGFMFSSYGMHWVRQAPGKGLEWVAVIWYDGTIKYYADSVQGRFTISRDNSKNTLYLQMNSLRAEDTAVYYCARKGDTSNGSGSHYNEGFFDIWGQGTMVTVSLA

SEQ ID NO: 8661 - protein, 119 aa, Homo sapiens; identical to SEQ ID NO: 8635
  REGION 1..119: note = Heavy chain

SEQ ID NO: 8662 - protein, 119 aa, Homo sapiens; identical to SEQ ID NO: 8627
  REGION 1..119: note = Heavy chain

SEQ ID NO: 8663 - protein, 119 aa, Homo sapiens; identical to SEQ ID NO: 8627
  REGION 1..119: note = Heavy chain

SEQ ID NO: 8664 - protein, 119 aa, Homo sapiens
  REGION 1..119: note = Heavy chain
EVQLVESGGGVVRPGGSLRLSCAASGFTFDDYGMSWVRQVPGKGLEWVSGINWNGGSTGYADSVKGRFTISRDNAKNSLYLQMNSLRAEDTALYYCVRDGWRLLDDYWGQGTLVTVSSA

SEQ ID NO: 8665 - protein, 118 aa, Homo sapiens; identical to SEQ ID NO: 8633
  REGION 1..118: note = Heavy chain

SEQ ID NO: 8666 - protein, 119 aa, Homo sapiens
  REGION 1..119: note = Heavy chain
EVQLVESGGGVVRPGGSLRLSCAASGFTFDDYGMSWVRQAPGKGLEWVSGINWNGGSTGYADSVKGRFTISRDNAKNSLYLQMNSLRAEDTALYHCARDGWELLDDYWGQGTLVTVSSA

SEQ ID NO: 8667 - protein, 119 aa, Homo sapiens; identical to SEQ ID NO: 8635
  REGION 1..119: note = Heavy chain

SEQ ID NO: 8668 - protein, 119 aa, Homo sapiens; identical to SEQ ID NO: 8635
  REGION 1..119: note = Heavy chain

SEQ ID NO: 8669 - protein, 118 aa, Homo sapiens
  REGION 1..118: note = Heavy chain
QVQLVQSGAEVKKPGASVKVSCKASGYTFTSYGISWVRQAPGQGLEWMGWISAYNGNTNYVQKFQGRVTMTTDTSTSTAYMELRSLRSDDTAVYFCARLSRAGHDYWGQGTLVTVSSA

SEQ ID NO: 8670 - protein, 115 aa, Homo sapiens
  REGION 1..115: note = Heavy chain
QVQLVESGGGVVQPGRSLRLSCAASGFTFSSYGIHWVRQAPGKGLEWVAVIWYDGRNKYYADSVKGRFTISRDNSKNTLYLQMNSLRAEDTAVYYCARGGNWGPFDYWGQGTLVT

SEQ ID NO: 8671 - protein, 119 aa, Homo sapiens; identical to SEQ ID NO: 8627
  REGION 1..119: note = Heavy chain

SEQ ID NO: 8672 - protein, 119 aa, Homo sapiens
  REGION 1..119: note = Heavy chain
EVQLVESGGRVVRPGGSLRLSCAVSGFTFADYGMSWVRQAPGKGLEWVSGINWNGGTTGYADSVKGRFTISRDNAKNSLYLQMNSLRAEDTALYHCVRDGWELLDDYWGRGTLVTVSSA

SEQ ID NO: 8673 - protein, 119 aa, Homo sapiens
  REGION 1..119: note = Heavy chain
QVQLVESGGGVVQPGRSLRLSCAASGFTLSSYGMHWVRQAPGKGLEWVAVIWYDGSNKHYADSVKGRFTISRDNSKNTLYLQMNSLRAEDTAVYYCVRGGIWGNFDYWGQGTLVTVSSA

SEQ ID NO: 8674 - protein, 119 aa, Homo sapiens
  REGION 1..119: note = Heavy chain
QVQLVESGGGVVQPGRSLRLSCAASGFTFSSYGMHWVRQAPGKGLEWVAVIWYDGSNKHYADSVKGRFTISRDNYKKTVSLQVNSLRAEDTAVYYCARGGIWGYFDSWGQGTLVTVSSA

SEQ ID NO: 8675 - protein, 115 aa, Homo sapiens
  REGION 1..115: note = Heavy chain
QVQLVESGGGVVQPGRSLRLSCAASGFTFSSYGIHWVRQAPGKGLEWVAVIWYDGRNKYYADSVKGRFTISRDNSKNTLYLQMNSLRAEDTAVYYCARAGNWGPFDSWGQGTLVT

SEQ ID NO: 8676 - protein, 119 aa, Homo sapiens
  REGION 1..119: note = Heavy chain
EVQLVESGGGVVRPGGSLRLSCAASGFTFDDYGMSWVRQTPGKGLEWVSGINWNGGSTGYVDSVKGRFIISRDNAKNSLYLQMNSLRAEDTALYYCARDGWKLLDDYWGQGTLVTVSSA

SEQ ID NO: 8677 - protein, 119 aa, Homo sapiens
  REGION 1..119: note = Heavy chain
EVQLVESGGGVVRPGGSLRLSCAASGFTFDDYGMSWVRQAPGKGLEWVSGINWNGGSTGYADSVKGRFTISRDNAKNSLYLQMNSLRAEDTALYHCVRDGWELLGDYWGQGTLVTVSSA

SEQ ID NO: 8678 - protein, 119 aa, Homo sapiens
  REGION 1..119: note = Heavy chain
QVQLVESGGGVVQPGRSLRLSCAASGFTFSNHGMHWVRQAPGKGLEWVAVIWYDGSNKHYADSVMGRFILSRDNSKNTLYLQMNSLRAEDTAVYYCARGGIWGYFDYWGQGTLVTVSSA

SEQ ID NO: 8679 - protein, 118 aa, Homo sapiens
  REGION 1..118: note = Heavy chain
QVQLVQSGPEVKKPGASVKVSCKASGYTFTSYGIGWVRQAPGQGLEWMGWISAYNGNTNYVQKFQGRVTMTTDTSTSTAYMELRSLRSDDTAVYYCARVGASGVDYWGQGTLVTVSSA

SEQ ID NO: 8680 - protein, 117 aa, Homo sapiens; identical to SEQ ID NO: 8651
  REGION 1..117: note = Heavy chain

SEQ ID NO: 8681 - protein, 124 aa, Homo sapiens
  REGION 1..124: note = Heavy chain
QVQLVQSGAEVKKPGASVKVSCKASGYTFTSYYMHWVRQAPGQGLEWMGIVNPSGGTSIYAQKFQGRVTMTRDTSTSTVYMELSGLISEDTAVYYCARDPPITLVRGAPFDYWGQGTLVTVSSA

SEQ ID NO: 8682 - protein, 124 aa, Homo sapiens
  REGION 1..124: note = Heavy chain
QVQLVQSGAEVKKPGASVKVSCKASGYTFTSYYMHWVRQAPGQGLEWMGIVNPSSGSTNYAQKFQGRVTMTSDTSTSTVYMGLNSLRSEDTAVYYCARDPPITMVRGAPFDYWGQGTLVTVSSA

SEQ ID NO: 8683 - protein, 118 aa, Homo sapiens
  REGION 1..118: note = Heavy chain
QVQLVQSGAEVKKPGASVKVSCKASGYTFTSYGISWVRQAPGQGLEWMGWISVYNGNTNYAQKLQGRVTMTTDTSTSTAYMELRSLRSDDTAVYYCARVGANWFDPWGQGSLVTVSSA

SEQ ID NO: 8684 - protein, 119 aa, Homo sapiens; identical to SEQ ID NO: 8635
  REGION 1..119: note = Heavy chain

SEQ ID NO: 8685 - protein, 119 aa, Homo sapiens
  REGION 1..119: note = Heavy chain
QVQLVESGGGVVQPGRSLRLSCAASGFTFSSYGMHWVRQALGKGLEWVAVIFYDGSNNYYADSVKGRFTISRDNSKNTLYLQMDSLRADDTAVYYCARGGFFGPFDYWGQGTLVTVSSA

SEQ ID NO: 8686 - protein, 119 aa, Homo sapiens; identical to SEQ ID NO: 8631
  REGION 1..119: note = Heavy chain

SEQ ID NO: 8687 - protein, 124 aa, Homo sapiens; identical to SEQ ID NO: 8682
  REGION 1..124: note = Heavy chain

SEQ ID NO: 8688 - protein, 119 aa, Homo sapiens
  REGION 1..119: note = Heavy chain
EVQLVESGGGVVRPGGSLRLSCAASGFTFDDYGMSWVRQAPGKGLEWVSGINWNGGNTGYVDSVKGRFIISRDNAKNSLYLQMNSLRVEDTALYYCARDGWRLLDDYWGQGTQVTVSSS

SEQ ID NO: 8689 - protein, 122 aa, Homo sapiens
  REGION 1..122: note = Heavy chain
QVQLVQSGAEVKKPGASVKVSCKASGYTFTSYGINWVRQAPGQGLEWMGWISAYNGNTNYAQKLQGRVTMTTDTSTSTAYMELRSLRSDDTAVYYCARLYCSGGSCYSDYWGQGTLVTVSSA

SEQ ID NO: 8690 - protein, 124 aa, Homo sapiens
  REGION 1..124: note = Heavy chain
QVQLVQSGAEVKKPGASVKVSCKASGFTFTSYYIHWVRQAPGQGLEWMGIINPSGGSTISAQKFQGRVTMTSDTSTSTVSMELSSLRSDDTAVYYCARDPPITMVRDAPFDYWGQGTLVTVSSA

SEQ ID NO: 8691 - protein, 121 aa, Homo sapiens; identical to SEQ ID NO: 8652
  REGION 1..121: note = Heavy chain

SEQ ID NO: 8692 - protein, 129 aa, Homo sapiens
  REGION 1..129: note = Heavy chain
QVQLVESGGGVVQPGRSLRLSCAASGFTFSSYGMHWVRQAPGKGLEWVAVIWYDGNHKYYADSVQGRFTISRDNSKNTLYLQMNSLGAEDTAVYYCARKGDNSYGSGSYYNEGFFDMWGQGTMVTVSSA

SEQ ID NO: 8693 - protein, 119 aa, Homo sapiens
  REGION 1..119: note = Heavy chain
QVQLVESGGGVVQPGRSLRLSCAASGFTFSSYGMHWVRQAPGKGLEWVAVIWYDGRNKFYADSVKGRFTISRDNSKNTLYLQMNSLRAEDTAVYYCARVGLLGGMDVWGQGTTVTVSSA

SEQ ID NO: 8694 - protein, 119 aa, Homo sapiens; identical to SEQ ID NO: 8677
  REGION 1..119: note = Heavy chain

SEQ ID NO: 8695 - protein, 119 aa, Homo sapiens; identical to SEQ ID NO: 8631
  REGION 1..119: note = Heavy chain

SEQ ID NO: 8696 - protein, 129 aa, Homo sapiens
  REGION 1..129: note = Heavy chain
QVQLVESGGGVVQPGRSRRLSCAASGFMFSSYGMHWVRQAPGKGLEWVAVIWYDGTIKYYADSVQGRFTISRDNSKNTLYLQMNSLRAEDTAMYYCARKGDTSNGSGSHYNEGFFDIWGQGTMVTVSLA

SEQ ID NO: 8697 - protein, 119 aa, Homo sapiens
  REGION 1..119: note = Heavy chain
QVQLVESGGGVVQPGRSLRLSCAASGFTLSSHGMHWVRQAPGKGLEWVAVTWYDGSNKHYADSVKGRFTISRDNSKNTLYLQMNSLRVEDTAVYYCARGGLLGATDYWGQGTLVTVSSA

SEQ ID NO: 8698 - protein, 119 aa, Homo sapiens; identical to SEQ ID NO: 8688
  REGION 1..119: note = Heavy chain

SEQ ID NO: 8699 - protein, 119 aa, Homo sapiens
  REGION 1..119: note = Heavy chain
QVQLVESGGGVVQPGRSLRLSCAASGFTFSSHGMDWVRQAPGKGLEWVAVIWYDGRNKYYADSVKGRFTISRDNSKNTLYLQMNSLRVEDTAVYYCARGGLIGGFDFWGQGTLVTVSSA

SEQ ID NO: 8700 - protein, 124 aa, Homo sapiens
  REGION 1..124: note = Heavy chain
QVQLVQSGAEVQKPGASVKVSCKASGYTFTSYYMHWVRQAPGQGLEWMGIINPSGGSSNYAQKFLDRLTMTRDTSTSTVYMELSGLRSEDTAVYYCARDPPITMFRGAPFDYWGQGTLVTVSSA

SEQ ID NO: 8701 - protein, 119 aa, Homo sapiens
  REGION 1..119: note = Heavy chain
QVQLVESGGGVVQPGRSLRLSCAASGFTFSSYGIHWVRQAPGKGLEWVAVIWYDGRNKYYADSVKGRFTMSRDNSKNTLYLQMNSLRAEDTAVYFCARVGLLGAMDVWGQGTTVTVSSA

SEQ ID NO: 8702 - protein, 119 aa, Homo sapiens
  REGION 1..119: note = Heavy chain
QVQLVESGGGVVQPGRSLRLSCAASGFTFSSHGMDWVRQAPGKGLEWVAVIWYDGRNKYYADSVKGRFTISRDNSKNTLYLQMNSLRVEDTAVYYCARGGLIGGFDHWGQGTLVTVSSA

SEQ ID NO: 8703 - protein, 119 aa, Homo sapiens
  REGION 1..119: note = Heavy chain
QVQLVESGGGVVQPGRSLRLSCAASGFTFSSYGMHWVRQAPGKGLEWVAVIWYDGNNKHYADAVRGRFTISRDNSKNTLYLQMNSLRAEDTAVYHCVRGGIWGYFDYWGQGTLVTVSSA

SEQ ID NO: 8704 - protein, 121 aa, Homo sapiens
  REGION 1..121: note = Heavy chain
QVQLVQSGAEVKKPGASVKVSCKASGYTFTNYGISWVRQAPGQGLEWMGWISAYNGNTNYAQKLQGRVTMTTDTSTSTAYMELRSLRSDDTAVYYCARKNGYDPNGFDPWGQGTLVTVSSA

SEQ ID NO: 8705 - protein, 119 aa, Homo sapiens; identical to SEQ ID NO: 8631
  REGION 1..119: note = Heavy chain

SEQ ID NO: 8706 - protein, 118 aa, Homo sapiens; identical to SEQ ID NO: 8683
  REGION 1..118: note = Heavy chain

SEQ ID NO: 8707 - protein, 119 aa, Homo sapiens; identical to SEQ ID NO: 8685
  REGION 1..119: note = Heavy chain

SEQ ID NO: 8708 - protein, 119 aa, Homo sapiens
  REGION 1..119: note = Heavy chain
QVQLVESGGGVVQPGRSLRLSCAASGFIFSSYGMHWVRQAPGKGLEWVAVIWYDGRNKHYADSVKGRFTISRDNSKNTLYLQMNSLRAEDTAVYYCARSGSLGAFDIWGQGTMVTVSSA

SEQ ID NO: 8709 - protein, 119 aa, Homo sapiens
  REGION 1..119: note = Heavy chain
EVQLVESGGGVVRPGGSLRLSCAASGFIFEDYGMSWVRQTPGKGVEWVSGINWNGGNTGYADSVKGRFTISRDNAKSFLYLQMNGLRAEDTALYYCARDGWKLLDDYWGQGTLVTVSSA

SEQ ID NO: 8710 - protein, 119 aa, Homo sapiens
  REGION 1..119: note = Heavy chain
EVQLVESGGGVVRPGGSLRLSCAASGFTFDDYGMSWVRQAPGKGLEWVSGINWNGGSTGYVDSVKGRFIISRDNAKNSLYLQMNSLRAEDTALYYCARDGWRLLDDYWGQGTLVTVSSA

SEQ ID NO: 8711 - protein, 124 aa, Homo sapiens
  REGION 1..124: note = Heavy chain
QVQLVQSGAEVKKPGASVKVSCKSSGYTFTSYYMHWVRQAPGQGLEWMGIINPSSGGSTYAQKFQGRVTMTRDTSTSTVYMELSVLRSEDTAVYYCARDPPITMVRGAPFDYWGQGTLVTVSSA

SEQ ID NO: 8712 - protein, 119 aa, Homo sapiens
  REGION 1..119: note = Heavy chain
QVQLVESGGGVVQPGRSLRLSCAASGFTFSSYGMHWVRQAPGKGLEWVAVIWYDGNNKHYAVSVKGRFTISRDISTNTLYLQMNSLRAEDTAVYYCARGGLLGGFDYWGQGTLVTVSSA

SEQ ID NO: 8713 - protein, 121 aa, Homo sapiens; identical to SEQ ID NO: 8637
  REGION 1..121: note = Heavy chain

SEQ ID NO: 8714 - protein, 119 aa, Homo sapiens
  REGION 1..119: note = Heavy chain
QVQLVESGGGVVQPGRSLRLSCAASGFTFSNFGIHWVRQAPGKGLEWVAVIWYDGRNKHYADSVEGRFTITRDNSNNTLYLQMNSLRAEDTAVYYCARQGYMGSLDYWGQGILVTVSSA

SEQ ID NO: 8715 - protein, 118 aa, Homo sapiens
  REGION 1..118: note = Heavy chain
QVQLVQSGAEVKKPGASVKVSCKASGYTFTSYGISWVRQAPGQGLEWMGWISAYNGNTNYAQKLQGRVTMTTDTSTSTAYMELRSLRSDDTAVYYCARVGANWFDPWGQGTLVTVSSA

SEQ ID NO: 8716 - protein, 119 aa, Homo sapiens; identical to SEQ ID NO: 8712
  REGION 1..119: note = Heavy chain

SEQ ID NO: 8717 - protein, 119 aa, Homo sapiens
  REGION 1..119: note = Heavy chain
EVQLVESGGGVVRPGGSLRLSCAASGFTFDDYGMSWVRQAPGKGLEWVSGINWNGGSTGYVDSVKGRFAISRDNAKNSLYLQMNSLRAEDTALYHCVRDGWELLGDYWGQGTLVTVSSA

SEQ ID NO: 8718 - protein, 119 aa, Homo sapiens
  REGION 1..119: note = Heavy chain
EVQLVESEGGVVRPGGSLRLSCAASGFTFDDYGMSWVRQAPGKGLEWVSGINWNGGSTGYADSVKGRFTISRDNAKNSLYLQMNSLRAEDTALYHCARDGWELLDDYWGRGTLVTVSSA

SEQ ID NO: 8719 - protein, 119 aa, Homo sapiens; identical to SEQ ID NO: 8709
  REGION 1..119: note = Heavy chain

SEQ ID NO: 8720 - protein, 119 aa, Homo sapiens
  REGION 1..119: note = Heavy chain
EVQLVESGGGVVRPGGSLRLSCAASGFTFDDYGMSWVRQAPGKGLEWVSGINWNGGSTGYADSVKGRFTISRDNAKNSLYLQMNSLRAEDTALYHCMRDGWELLGDFWGQGTLVTVSSA

SEQ ID NO: 8721 - protein, 118 aa, Homo sapiens
  REGION 1..118: note = Heavy chain
QVQLVQSGAEVKKPGASVKVSCKASGYTFTSYGVTWVRQAPGQGLECMGWISAYNGNTNYAQKLQGRVTMTTDTSTNTAYMELRSLRSDDTAVYYCARKSPWGFDYWGQGTLVTVSSA

SEQ ID NO: 8722 - protein, 119 aa, Homo sapiens; identical to SEQ ID NO: 8709
  REGION 1..119: note = Heavy chain

SEQ ID NO: 8723 - protein, 119 aa, Homo sapiens; identical to SEQ ID NO: 8709
  REGION 1..119: note = Heavy chain

SEQ ID NO: 8724 - protein, 119 aa, Homo sapiens
  REGION 1..119: note = Heavy chain
EVQLVESGGGVVRPGGSLRLSCAASGFIFEDYGMSWVRQTPGKGVEWVSGINWNGGNTGYADSVKGRFTISRDNAKSFLYLQMNGLRAEDTALYYCARDGWKRLDDYWGQGTLVTVSSA

SEQ ID NO: 8725 - protein, 119 aa, Homo sapiens
  REGION 1..119: note = Heavy chain
EVQLVESGGGVVRPGGSLRLSCAASGFTFDDYGMSWVRQAPGKGLEWVSGINWNGASTGYVDSVKGRFIISRDNAKNSLYLQMNSLRVEDTALYYCARDGWKLLDDSWGQGTLVTVSSA

SEQ ID NO: 8726 - protein, 119 aa, Homo sapiens; identical to SEQ ID NO: 8709
  REGION 1..119: note = Heavy chain

SEQ ID NO: 8727 - protein, 121 aa, Homo sapiens
  REGION 1..121: note = Heavy chain
QVQLVESGGGVVQPGGSLRLSCAASGFTLRGYGMHWVRQAPGKGLEWVAVIWNDGSNKYYADSVKGRFTISRDNSKNTLYLQMNSLRAEDTAVYYCARTYTWNDVGWDYWGQGTLVTVSSA

SEQ ID NO: 8728 - protein, 119 aa, Homo sapiens
  REGION 1..119: note = Heavy chain
EVQLVESGGGVVRPGGSLRLSCAASGFIFEDYGMSWVRQTPGKGVEWVSGINWNGGNTGYADSVKGRFTISRDNAKSFLYLQMNGLRAEDTALYYCARDGWNLLDDYWGQGTLVTVSSA

SEQ ID NO: 8729 - protein, 118 aa, Homo sapiens
  REGION 1..118: note = Heavy chain
QVQLVQSGTDVKKPGASVKVSCKASGYTFTSYGITWVRQAPGQGLECMGWISVYNGNTNYAQKLQDRVTMTTDTSTSTAYMELRSLRSDDTAVYYCARKNRWGFDYWGQGTQVTVSSA

SEQ ID NO: 8730 - protein, 115 aa, Homo sapiens
  REGION 1..115: note = Heavy chain
EVQLVESGGGVVRPGGSLRLSCAASGFTFDDYGMSWVRQAPGKGLEWVSGINWNGGSTGYADSVKGRFTISRDNAKNSLYLQMNSLRAEDTALYHCARDGWKLRDDYWGQGTLVT

SEQ ID NO: 8731 - protein, 129 aa, Homo sapiens
  REGION 1..129: note = Heavy chain
QVQLVESGGGVVQPGNSLRVSCAASGFIFSSYGMHWVRQAPGKGLEWVAVIWYDGGIKYYADSVKGRFTISRDNSKNTLYLQMTSLRAEDTAVYYCARKGDNSYGSGSHYNEGFFDIWGQGTMVTVSSA

SEQ ID NO: 8732 - protein, 120 aa, Homo sapiens
  REGION 1..120: note = Heavy chain
QVQLVQSGAEVKKPGASVKVSCKASGYTFTNYGISWVRQAPGQGLEWMGWISAYNGNTNFAQKFQGRVTMTTDTSTSTAYMELRSLRSDDTAVYYCARGPSGPYEGDYWGQGTLVTVSSA

SEQ ID NO: 8733 - protein, 119 aa, Homo sapiens
  REGION 1..119: note = Heavy chain
EVQLVESGGGVVRPGGSLRLSCAASGFIFEDYGMSWVRQTPGKGVEWVSGINWNGGNTGYADSVKGRFTISRDNAKSFLYLQMNGLRAEDTALYYCVRDGWKLLDDYWGQGTLVTVSSA

SEQ ID NO: 8734 - protein, 118 aa, Homo sapiens
  REGION 1..118: note = Heavy chain
QVQLVQSGAEVKKPGASVKVSCKASGYTFTSYGISWVRQAPGQGLEWMGWISAYNGNTNYAQKLQGRVTMTTDTSTNTAYMELRSLRSDDTAVYYCARVGANWFDPWGQGTLVTVSSA

SEQ ID NO: 8735 - protein, 119 aa, Homo sapiens
  REGION 1..119: note = Heavy chain
QVQLVESGGGVVQPGRSLRLSCAASGFTFSSHGMHWVRQAPGKGLEWVAVTWYDGSNKHYADSVKGRATISRDNSKNTLYLQMNSLRAEDTAVYYCTRGELLGYFDYWGQGTLVTVSSA

SEQ ID NO: 8736 - protein, 119 aa, Homo sapiens
  REGION 1..119: note = Heavy chain
QVQLVQSGAEVKKPGASVKVSCKASGYTFNSYGISWVRQAPGQGLEWMGWISAYNGNTNYAQKLQGRVTMTTDTSTSTAYMELRSLRSDDTAVYFCARVGRHLAFAYWGQGTLVTVSSA

SEQ ID NO: 8737 - protein, 119 aa, Homo sapiens
  REGION 1..119: note = Heavy chain
QVQLVESGGGVVQPGRSLRVSCAASGFIFSSYGIHWVRQAPGKGLEWVAVIWYDGSNKHYADSVKGRFTISRDNSKNTLYLQMNSLRADDTAVYYCARGHLLGYFDYWGQGTLVTVSSA

SEQ ID NO: 8738 - protein, 119 aa, Homo sapiens
  REGION 1..119: note = Heavy chain
QVQLVESGGGVVQPGRSLRLSCAASGFTFSSYGVHWVRQAPGKGLEWVSVILYDGNNKFYADSVKGRFTISRDNSKNTLYLQMNSLRAEDTAVYFCARGALLGAFDIWGRGTMVTVSSA

SEQ ID NO: 8739 - protein, 119 aa, Homo sapiens
  REGION 1..119: note = Heavy chain
QVQLVESGGGVVQPGRSLRLSCAASGFTFSSHGMHWVRQAPGKGLEWVAVIWYDGSNKHYADSVKGRFTISRDNSKNTLYLQMNSLRAEGTAVYYCARGGLMGGFDYWGQGTLVTVSSA

SEQ ID NO: 8740 - protein, 119 aa, Homo sapiens
  REGION 1..119: note = Heavy chain
QVQLVESGGGVVQPGRSLRLSCAASGFTFSSHGIHWVRQAPGKGLEWVAVIWYDGSNKHYGDSVKGRFTISRDNSKNTLYLQMNSLRAEDTAVYYCARGGYFGCFDHWGQGTLVTVSSA

SEQ ID NO: 8741 - protein, 122 aa, Homo sapiens
  REGION 1..122: note = Heavy chain
QVQLVESGGDVVQPGRSLRLSCAASGFTFSSHAMHWVRQAPGKGLEWVAVIWYDGNNKYYEDSVKGRFTISRDNSKNTLYLQMNSLRAEDTAVYYCAREKGIGWYEGMDVWGQGTTVTVSSA

SEQ ID NO: 8742 - protein, 119 aa, Homo sapiens
  REGION 1..119: note = Heavy chain
QVQLVESGGGVVQPGRSLRLSCAASGFTFSSYGMHWVRQAPGKGLEWVAAIWYDGNNKYYIDSVKGRFTISRDSSKNTLFLQMNSLRAEDTAVYYCARGGQLGYFDYWGQGTLVTVSSA

SEQ ID NO: 8743 - protein, 120 aa, Homo sapiens
  REGION 1..120: note = Heavy chain
QVQLQESGPGLVKPSETLSLTCTVSGGSISSYYWSWIRQPPGKGLEWIGYIHYSGRTNYNPSLKSRVTITVDTSEKQFSLKVNSVTAADTAVYYCARGYRGSYGLFDYWGQGILVTVSSA

SEQ ID NO: 8744 - protein, 122 aa, Homo sapiens
  REGION 1..122: note = Heavy chain
QVQLVESGGDVVQPGRSLRISCAASGFTFSSHAMHWVRQAPGKGLEWVAVIWYDGNNKYYEDSVNGRFTISRDNSKNTLYLQMNSLRAEDTALYFCAKEKGIGWYEGMDVWGQGTTVTVSSA

SEQ ID NO: 8745 - protein, 119 aa, Homo sapiens
  REGION 1..119: note = Heavy chain
QVQLVQSGAEVKKPGASVKVSCKASGYTFTSYGISWVRQAPGQGLECMGWISAYNGNTNYAQKLQGRVTMTTDTSTSTAYMELRSLRSDDTAVYYCARVGRFGEFDYWGQGTLVTVSSA

SEQ ID NO: 8746 - protein, 119 aa, Homo sapiens
  REGION 1..119: note = Heavy chain
QVQLVESGGGVVQPGRSLRLSCAASGFTFSSHGMHWVRQAPGKGLEWVAVIWYDGSNKHYADSVKGRFTTSRDNSKNTLHLQMNSLRAEDTAVYYCTRGGYFGCFDYWGQGTLVTVSSA

SEQ ID NO: 8747 - protein, 119 aa, Homo sapiens
  REGION 1..119: note = Heavy chain
QVQLVESGGGVVQPGRSLRLSCAASGFTFSSYGMHWVRQAPGKGLEWVAVIWYDGSNKYYADSVKGRFTISRDNSKNTLYLQMNSLRAEDTAVYYCARGGYLGAFDIWGQGTMVTVSSA

SEQ ID NO: 8748 - protein, 119 aa, Homo sapiens
  REGION 1..119: note = Heavy chain
QVQLVESGGGVVQPGRSLRLSCAASGFTFSTHGMHWVRQAPGKGLEWVAVVWYDGSNKHYADSVKGRFTISRDNSKNTLYLQMNSLRVEDTAVYYCARGGYFGCFDYWGQGTLVTVSSA

SEQ ID NO: 8749 - protein, 119 aa, Homo sapiens; identical to SEQ ID NO: 8748
  REGION 1..119: note = Heavy chain

SEQ ID NO: 8750 - protein, 119 aa, Homo sapiens
  REGION 1..119: note = Heavy chain
QVQLVESGGGVVQPGRSLRLSCAASGFTFSSYGMHWVRQAPGKGLEWVAVIWYDGSNRYYADSVKGRFTISRDISKNTLYLQMNSLRAEDTAMYYCARGDLLGAFDIWGQGTMVTVSSA

SEQ ID NO: 8751 - protein, 119 aa, Homo sapiens; identical to SEQ ID NO: 8748
  REGION 1..119: note = Heavy chain

SEQ ID NO: 8752 - protein, 121 aa, Homo sapiens
  REGION 1..121: note = Heavy chain
QVQLVQSGAEVKKPGASVKVSCKASGYTFTSYGISWVRQAPGQGLEWMGWISAYNGNTNYAQKLQGRVTMTTDTSTSTAYMELRSLRSDDTAVYYCARLTGTTSHAFDIWGQGTMVTVSSA

SEQ ID NO: 8753 - protein, 117 aa, Homo sapiens
  REGION 1..117: note = Heavy chain
QVQLVQSGAEVKKPGASVKVSCKASGYTFTSYGITWVRQAPGQGLEWMGWISAYNGNTHYAQKFQGRVTMTTDTSTTTAYMELRSLRSDDTAVYYCARVGPSFDYWGQGALVTVSSA

SEQ ID NO: 8754 - protein, 118 aa, Homo sapiens
  REGION 1..118: note = Heavy chain
QVQLVQSGAEVKKPGASVKVSCKASGYTFTSYGISWVRQAPGQGLEWMGWISAYNGNTNYAQKLQGRVTMTTDTSTSTAYMELRSLRSDDTAVYYCARVGVNWFDPWGQGTLVTVSSA

SEQ ID NO: 8755 - protein, 121 aa, Homo sapiens
  REGION 1..121: note = Heavy chain
QVQLVQSGAEVKKPGASVKVSCKASGYTFTSYGISWVRQAPGQGLEWMGWISAYNGNTNYAQNLQGRVTMTTDTSTSTAYMELRSLRSDDTAVFYCARLTGATSHAFDIWGQGTMVTVSSA

SEQ ID NO: 8756 - protein, 118 aa, Homo sapiens
  REGION 1..118: note = Heavy chain
QVQLVQSGAEVKKPGASVKVSCKASGYTFTSYGISWVRQAPGQGLEWMGWISAYNGNTNYAQKLQGRVTMTTDTSTNTAYMELRSLRSDDTAVYYCVRVGANWFDPWGQGTLVTVSSA

SEQ ID NO: 8757 - protein, 119 aa, Homo sapiens
  REGION 1..119: note = Heavy chain
QVQLVESGGGVVQPGRSLRLSCAASGFTFSSYGMHWVRQAPGKGLEWVAVIWYDGRNKYYADSVKGRFTISRDNSKNTLDLQMNSLRAEDTAVYYCARNQPLGSFDYWGQGTLVTVSSA

SEQ ID NO: 8758 - protein, 119 aa, Homo sapiens
  REGION 1..119: note = Heavy chain
QVQLVESGGGVVQPGRSLRLSCAASGFTFSSYGIHWVRQAPGKGLEWVAVIWYDGSNKHYADSVKGRSTISRDNSKNTLYLQMNSLRAEDTAVYYCARGELLGYFDYWGQGTLVTVSSA

SEQ ID NO: 8759 - protein, 119 aa, Homo sapiens; identical to SEQ ID NO: 8740
  REGION 1..119: note = Heavy chain

SEQ ID NO: 8760 - protein, 118 aa, Homo sapiens; identical to SEQ ID NO: 8734
  REGION 1..118: note = Heavy chain

SEQ ID NO: 8761 - protein, 119 aa, Homo sapiens
  REGION 1..119: note = Heavy chain
QVQLVQSGAEVKKPGASVKVSCKASGYTFTNYGISWVRQAPGQGLEWMGWISAYNGNTNYAQKLQGRVTMTTDTSTSTAYMELRSLRSDDTAVYYCARVAGYDAFDIWGQGTMVTVSSA

SEQ ID NO: 8762 - protein, 118 aa, Homo sapiens; identical to SEQ ID NO: 8734
  REGION 1..118: note = Heavy chain

SEQ ID NO: 8763 - protein, 118 aa, Homo sapiens; identical to SEQ ID NO: 8734
  REGION 1..118: note = Heavy chain

SEQ ID NO: 8764 - protein, 119 aa, Homo sapiens; identical to SEQ ID NO: 8738
  REGION 1..119: note = Heavy chain

SEQ ID NO: 8765 - protein, 118 aa, Homo sapiens; identical to SEQ ID NO: 8734
  REGION 1..118: note = Heavy chain

SEQ ID NO: 8766 - protein, 119 aa, Homo sapiens; identical to SEQ ID NO: 8748
  REGION 1..119: note = Heavy chain

SEQ ID NO: 8767 - protein, 119 aa, Homo sapiens; identical to SEQ ID NO: 8735
  REGION 1..119: note = Heavy chain

SEQ ID NO: 8768 - protein, 125 aa, Homo sapiens
  REGION 1..125: note = Heavy chain
QVQLVQSGAEVKKPGASVKVSCKASGYTFTSYGINWVRQAPGQGLEWMGWISAYNGNTNYAQKLQGRVTMTTDTSTSTAYMELRSLRSDDTAVYYCARDPVTMVRGVHWYFDLWGRGTLVTVSSA

SEQ ID NO: 8769 - protein, 119 aa, Homo sapiens; identical to SEQ ID NO: 8735
  REGION 1..119: note = Heavy chain

SEQ ID NO: 8770 - protein, 119 aa, Homo sapiens; identical to SEQ ID NO: 8736
  REGION 1..119: note = Heavy chain

SEQ ID NO: 8771 - protein, 119 aa, Homo sapiens
  REGION 1..119: note = Heavy chain
QVQLVESGGGVVQPGRSLRLSCAASGFTFSSYGLHWVRQAPGKGLEWVAVIWYDGSNKHYADSVKGRFTISRDNAKNTLYLQMNSLRAEDTAVYYCARGALLGAFEIWGQGTMVTVSSA

SEQ ID NO: 8772 - protein, 119 aa, Homo sapiens
  REGION 1..119: note = Heavy chain
QVQLVESGGGVVQPGRSLRLSCAASGFTFSSYGIHWVRQAPGKGLEWVAVIWYDGSNKHYADSVKGRFTISRDNSKNTLYLQMNSLRAEDTAVYYCARGELLGYFDYWGQGTLVTVSSA

SEQ ID NO: 8773 - protein, 119 aa, Homo sapiens
  REGION 1..119: note = Heavy chain
QVQLVESGGGVVQPGRSLRLSCAASGFTFSSHGMHWVRQAPGKGLEWVAVIWYDGSNKHYADSVKGRFTTSRDNSKNTLHLQMNSLRAEDTAVYYCARGGYFGCFDYWGQGTLVTVSSA

SEQ ID NO: 8774 - protein, 119 aa, Homo sapiens; identical to SEQ ID NO: 8773
  REGION 1..119: note = Heavy chain

SEQ ID NO: 8775 - protein, 119 aa, Homo sapiens
  REGION 1..119: note = Heavy chain
QVQLVESGGGVVQPGRSLRLSCAASGFTFSSYGMHWVRQAPGKGLEWVAVIWYDGNNKYYADSVKGRFTFSRDNSKNTLYLQMNSLRAEDTAVYYCARGALLGGFDYWGQGTLVTVSSA

SEQ ID NO: 8776 - protein, 119 aa, Homo sapiens
  REGION 1..119: note = Heavy chain
QVQLVESGGGVVQPGRSLRLSCEASGFTFSSYGMHWVRQAPGKGLEWVAVIWYEGRNKHYADSVKGRFTISRDNSKNTLYMQMNSLRAEDTAVYYCARGGELGPFDYWGQGTLVTVSSA

SEQ ID NO: 8777 - protein, 119 aa, Homo sapiens
  REGION 1..119: note = Heavy chain
QVQLVESGGGVVQPGRSLRLSCAASGFTFSSYGTHWVRQAPGKGLEWVAVIWYDGSNKYYADSVKGRFTISRDNSKNTLYLQMNSLRAEDTAVYYCARAGNWGAFDIWGQGTMVTVSSA

SEQ ID NO: 8778 - protein, 119 aa, Homo sapiens
  REGION 1..119: note = Heavy chain
QVQLVESGGGVVQPGRSLRLSCAASGFTFRSYGMHWVRQAPGKGLEWVAVTWYDGSNKNYADSVKGRFTISRDNSKNTLYLQMNSLRAEDTAVYYCARGGLTGDFDYWGQGTLVTVSSA

SEQ ID NO: 8779 - protein, 119 aa, Homo sapiens
  REGION 1..119: note = Heavy chain
QVQLVESGGGVVQPGRSLRLSCAASGFTFSSYGMHWVRQAPGKGLEWVAVTWYDGRNKYYADSLKGRFTISRDISKNTLYLQMNSLRDEDTAVYYCARGGSYGAFDIWGQGTMVTVSSA

SEQ ID NO: 8780 - protein, 119 aa, Homo sapiens
  REGION 1..119: note = Heavy chain
QVQLVESGGGVVQPGRSLRLSCAASGFTFSSYGIHWVRQAPGKGLEWVAVIWYDGSNKHYADSVKGRFTISRDNSKNTLYLQMNSLRAEDTAVYYCARGELLGYFDNWGQGTLVTVSSA

SEQ ID NO: 8781 - protein, 119 aa, Homo sapiens
  REGION 1..119: note = Heavy chain
QVQLVESGGGVVQPGRSLRLSCAASGFAFSSYGIHWVRQAPGKGLEWVAVIWYDGSNKHYADSVKGRSTISRDNSKNTLYLQMNSLRAEDTAVYYCARGELLGYFDSWGQGTLVTVSSA

SEQ ID NO: 8782 - protein, 119 aa, Homo sapiens
  REGION 1..119: note = Heavy chain
QVQLVESGGGVVQPGRSLRLSCAASGFTFSSYGIHWVRQAPGKGLEWVAVTWYDGSNKYYADSVKGRFTISRDNSKNTLFLQMNSLRAEDTAVYYCARGGLLGHFDYWGQGTLVTVSSA

SEQ ID NO: 8783 - protein, 119 aa, Homo sapiens; identical to SEQ ID NO: 8772
  REGION 1..119: note = Heavy chain

SEQ ID NO: 8784 - protein, 119 aa, Homo sapiens; identical to SEQ ID NO: 8782
  REGION 1..119: note = Heavy chain

SEQ ID NO: 8785 - protein, 119 aa, Homo sapiens
  REGION 1..119: note = Heavy chain
QVQLVESGGGVVQPERSLRLSCAASGFTFSSYGMHWVRQAPGKGLEWVAVIWYDGSNKHYADSVKGRFTISRDNSKNTLYLQMNSLRAEDTAVYYCARGGRLGAFDYWGQGTLVTVSSA

SEQ ID NO: 8786 - protein, 119 aa, Homo sapiens
  REGION 1..119: note = Heavy chain
QVQLVESGGGVVQPGRSLRLSCAASGFTFSSYGMHWVRQAPGKGLEWVAVIWYDGNNKHYADSVKGRSTISRDNSKNTLYLQMNSLRAEDTAVYYCARGGLLGYFDYWGQGTLVTVSSA

SEQ ID NO: 8787 - protein, 119 aa, Homo sapiens
  REGION 1..119: note = Heavy chain
QVQLVESGGGVVQPGRSLRLSCAASGFTFSSYGMHWVRQAPGKGLEWVAVVWYDGNNKHYADSVKGRFTISRDNSKNTLYLQMNSLRAEDTAVYYCARGDLLGSFDYWGQGTLVTVSSA

SEQ ID NO: 8788 - protein, 119 aa, Homo sapiens; identical to SEQ ID NO: 8772
  REGION 1..119: note = Heavy chain

SEQ ID NO: 8789 - protein, 119 aa, Homo sapiens
  REGION 1..119: note = Heavy chain
QVQLVESGGGVVQPGRSLRLSCAASGFTFSSYGIHWVRQAPGKGLEWVAVTWYDGSNKNYADSVKGRFTISRDNSKNKLYLQMNSLRAEDTAVYYCVRGELLGYFDYWGQGTLVTVSSA

SEQ ID NO: 8790 - protein, 121 aa, Homo sapiens
  REGION 1..121: note = Heavy chain
QVQLVESGGGVVQPGRSLRLSCAASGFTFSSYGMHWVRQAPGKGLEWVAVIWYDGSNKYYADSVKGRFTISRDDSRYTLYLQMNSLRAEDTAVYYCARGSILAAGIFDYWGQGTLVTVSSA

SEQ ID NO: 8791 - protein, 119 aa, Homo sapiens
  REGION 1..119: note = Heavy chain
QVQLVESGGGVVQPGRSLRLSCAASGFTFSSYGMHWVRQAPGKGLEWVAVIWYEGSNKYYADSVKGRFTISRDNSKNTLYLQMNSLRAEDTAVYYCARGGDWGAFDIWGQGTMVTVSSA

SEQ ID NO: 8792 - protein, 118 aa, Homo sapiens
  REGION 1..118: note = Heavy chain
QVQLVESGGGVVQPGRSLRLSCAASGFTFSSYGMHWVRQAPGKGLEWVAVKWYDGSNKHYVDSVKGRFTISRDNSKNTLYLQMNSLRAEDTAVYYCARSIVGAFDFWGQGTLVTVSSA

SEQ ID NO: 8793 - protein, 119 aa, Homo sapiens
  REGION 1..119: note = Heavy chain
QVQLVESGGGVVQPGRSLRLSCAASGFTFSSYGMHWVRQAPGKGLEWVAVIWYDGSNKNYADSVKGRFTISRDKSKNTLYLQMNSLRAEDTAVYYCARGGLTGGFDYWGQGTLVTVSSA

SEQ ID NO: 8794 - protein, 119 aa, Homo sapiens
  REGION 1..119: note = Heavy chain
QVQLVESGGGVVQPGRSLRLSCAASGFTFSSYGMNWVRQAPGKGLEWVAVTWYDGNNKHYADSVKGRFTISRDNSKNTLYLQMNSLKAEDTAVYYCARGGFFGCFDYWGQGALVTVSSA

SEQ ID NO: 8795 - protein, 119 aa, Homo sapiens; identical to SEQ ID NO: 8747
  REGION 1..119: note = Heavy chain

SEQ ID NO: 8796 - protein, 119 aa, Homo sapiens
  REGION 1..119: note = Heavy chain
QVQLVESGGGVVQPGRSLRLSCAASGFTFSSYGMHWVRQAPGKGLEWVAVIWYDGSNKHYADSLKGRFTISRDNSKNTLYLQMNSLRAEDTAVYYCARGSKLGPFDYWGQGTLVTVSSA

SEQ ID NO: 8797 - protein, 119 aa, Homo sapiens
  REGION 1..119: note = Heavy chain
QVQLVESGGGVVQPGRSLRLSCAASGFTFSSFGMHWVRQAPGKGLEWVAVTWYNGRNKYYADSVKGRFTISRDISKSTLYLQMNSLRVEDTAIYYCARGGYYGAFDIWGQGTMVTVSSA

SEQ ID NO: 8798 - protein, 119 aa, Homo sapiens; identical to SEQ ID NO: 8787
  REGION 1..119: note = Heavy chain

SEQ ID NO: 8799 - protein, 119 aa, Homo sapiens
  REGION 1..119: note = Heavy chain
QVQLVESGGGVVQPGRSLRLSCAASGFTFSSYGMHWVRQAPGKGLEWVAVVWYDGNNKHYADSVKGRFTISRDNSKNTLYLQMNSLRAEDTAVFYCARGHLLGSFDYWGQGTLVTVSSA

SEQ ID NO: 8800 - protein, 120 aa, Homo sapiens
  REGION 1..120: note = Heavy chain
QVQLQESGPGLVKPSETLSLTCTVSGGSISSYYWSWIRQPPGKGLEWIGYIHYSGRTNYNPSLKSRVTISVDTSKNQFSLKLSSVTAADTAVYYCARGYRGSYGLFDYWGQGTLVPVSSA

SEQ ID NO: 8801 - protein, 119 aa, Homo sapiens; identical to SEQ ID NO: 8737
  REGION 1..119: note = Heavy chain

SEQ ID NO: 8802 - protein, 125 aa, Homo sapiens
  REGION 1..125: note = Heavy chain
EVQLVESGGGLVQPGGSLRLSCAASGFTFSIYTMSWVRQAPGKGLEWVSTISGSGGGTYYADSVKGRFTISRDNSKNTLYLQMNSLRAEDTAVYYCAKDLLRYFDWLLSPFDYWGQGTLVTVSSA

SEQ ID NO: 8803 - protein, 119 aa, Homo sapiens; identical to SEQ ID NO: 8797
  REGION 1..119: note = Heavy chain

SEQ ID NO: 8804 - protein, 125 aa, Homo sapiens
  REGION 1..125: note = Heavy chain
QVQLVESGGGVVQPGRSLRLSCAASGFTFSSYGMHWVRQAPGKGLEWVAVISYDGSKKYYADSVKGRFTISRDNSKNTLYLQMNSLRAEDTAVYYCAREDDILTAYYYYGMDVWGQGTTVTVSSA

SEQ ID NO: 8805 - protein, 119 aa, Homo sapiens
  REGION 1..119: note = Heavy chain
QVQLVESGGGVVQPGRSLRLSCAASGFTFSSHGMHWVRQAPGKGLEWVAVTWYDGRNKYYADSVKGRLTISRDNSKNTLYLEMNSLRAEDTAVYYCARGGYYGPFDIWGQGTMVTVSSA

SEQ ID NO: 8806 - protein, 119 aa, Homo sapiens; identical to SEQ ID NO: 8739
  REGION 1..119: note = Heavy chain

SEQ ID NO: 8807 - protein, 118 aa, Homo sapiens
  REGION 1..118: note = Heavy chain
QVQLVESGGGVVQPGRSLRLSCAASGFTFSSYGMHWVRQAPGKGLEWVAVTWYDGSNKYYADSVKGRFTSSRDNSKNTLYLQMNSLRAEDTAVYYCARSIVGAFDYWGQGTLVTVSSA

SEQ ID NO: 8808 - protein, 120 aa, Homo sapiens
  REGION 1..120: note = Heavy chain
QVQLQESGPGLVKPSETLSLTCTVSGGSISSYYWSWIRQPPGKGLEWIGYIYYSGRTNYNPSLKSRVTISVDTSKNQLSLKLSSVTAADTAVYYCARGYSGSYGLFDYWGQGTLVTVSSA

SEQ ID NO: 8809 - protein, 119 aa, Homo sapiens; identical to SEQ ID NO: 8740
  REGION 1..119: note = Heavy chain

SEQ ID NO: 8810 - protein, 119 aa, Homo sapiens; identical to SEQ ID NO: 8757
  REGION 1..119: note = Heavy chain

SEQ ID NO: 8811 - protein, 125 aa, Homo sapiens
  REGION 1..125: note = Heavy chain
QVQLVESGGGVVQPGRSLRLSCAASGFTFSSYGMHWVRQAPGKGLEWVAVISYDGSNKYYADSVKGRFTISRDNSKNTLYLQMNSLRAEDTAVYYCARDRGTYYDYYYYGMDVWGQGTTVTVSSA

SEQ ID NO: 8812 - protein, 123 aa, Homo sapiens
  REGION 1..123: note = Heavy chain
QVQLVESGGGVVQPGRSLRLSCAASGFTFSNYGMHWVRQAPGKGLEWVSVISYDGSHKYYADSVKGRFTISRDSSKNTLYLQMNSLRAEDTAVYYCARDDDILTGLYGMDVWGQGTTVTVSSA

SEQ ID NO: 8813 - protein, 125 aa, Homo sapiens; identical to SEQ ID NO: 8811
  REGION 1..125: note = Heavy chain

SEQ ID NO: 8814 - protein, 126 aa, Homo sapiens
  REGION 1..126: note = Heavy chain
EVQLVESGGGLVQPGGSLRLSCAASGFTFSSYWMSWVRQAPGKGLEWVANIKQDGSEKYYVDSVKGRFTISRDNAKNSLYLQMNSLRAEDTAVYYCARDRYYYGSGRYYRYLDLWGRGTLVTVSSA

SEQ ID NO: 8815 - protein, 122 aa, Homo sapiens
  REGION 1..122: note = Heavy chain
QVQLVESGGGVVQPGRSLRLSCAASGFTFSSYAMHWVRQAPGKGLEWVAVIWYDGNNKYYADSVKGRFTISRDNSKNTLYLQMNSLRAEDTAVYYCARDRGSGNYEYFDLWGRGTLVTVSSA

SEQ ID NO: 8816 - protein, 123 aa, Homo sapiens
  REGION 1..123: note = Heavy chain
QLQLQESGPGLVKPSETLSLTCTVSGGSISSSSYYWGWIRQPPGKGLEWIGSIYYSGSTYYNPSLKSRVTIPVDTSKTQFSLKLSSVTAADTAVYYCARIGRIAAAGSIDYWGQGTLVTVSSA

SEQ ID NO: 8817 - protein, 119 aa, Homo sapiens; identical to SEQ ID NO: 8777
  REGION 1..119: note = Heavy chain

SEQ ID NO: 8818 - protein, 119 aa, Homo sapiens
  REGION 1..119: note = Heavy chain
QVQLVESGGGVVQPGRSLRLSCAASGFTLSSYGMHWVRQAPGKGLEWVAVIWYDGSNKYYADSVKGRFTFSRDNSKNTLYLQMNSLRAEDTAVYYCARGGLTGAFDIWGQGTTVTVSSA

SEQ ID NO: 8819 - protein, 119 aa, Homo sapiens; identical to SEQ ID NO: 8775
  REGION 1..119: note = Heavy chain

SEQ ID NO: 8820 - protein, 117 aa, Homo sapiens
  REGION 1..117: note = Heavy chain
QVQLVQSGAEVKKPGASVKVSCKASGYTFTSYGISWVRQAPGQGLEWMGWISAYNGNTNYAQKLQGRVTMTTDTSTSTAYMELRSLRSDDTAVYYCARVGPHFDYWGQGTLVTVSSA

SEQ ID NO: 8821 - protein, 119 aa, Homo sapiens
  REGION 1..119: note = Heavy chain
QVQLVESGGGVVQPGRSLRLSCAASGFTFSSYGMHWVRQGPGKGLDWVAVVWYDGNNKHYADSVKGRFTISRDNSKNTLFLQMNSLRVEDTAVYYCARGGLLGSFDYWGQGTLVTVSSA

SEQ ID NO: 8822 - protein, 120 aa, Homo sapiens
  REGION 1..120: note = Heavy chain
QVQLVESGGGVVQPGRSLRLSCAASGFTFSSYGMHWVRQAPGKGLEWVAVIWYDGSNKHYADSVKGRLTISRDNSKNTLYLQMNSLRAEDTAVYYCARGANWGPHFDYWGRGTLVTVSSA

SEQ ID NO: 8823 - protein, 119 aa, Homo sapiens
  REGION 1..119: note = Heavy chain
QVQLVESGGGVVQPGRSLRLSCAASGFTFSSFGMHWVRQAPGKGLEWVAVIWYDGNNKYYADSVKGRFTISRDNSKNTLSLQMNSLRAEDTALYYCARGALLGAFDIWGQGTMVTVSSA

SEQ ID NO: 8824 - protein, 117 aa, Homo sapiens
  REGION 1..117: note = Heavy chain
QVQLVQSGAEVKKPGASVKVSCKASGYTFTNYGISWVRQAPGQGLEWMGWISVYNGNTNYAQKLQGRVTMTTDTSTSTAYMELRSLRSDDTAVYYCARGPPTLHYWGQGTLVTVSSA

SEQ ID NO: 8825 - protein, 121 aa, Homo sapiens
  REGION 1..121: note = Heavy chain
QVQLVESGGGVVQPGRSLRLSCAASGFTFSSYGMHWVRQAPGKGLEWVAVLWYDGSNNYFADSVKGRFTISRDNSKNTLYLHMNSLRAEDTAVYYCARGGLWFGEFLDYWGQGTLVTVSSA

SEQ ID NO: 8826 - protein, 119 aa, Homo sapiens
  REGION 1..119: note = Heavy chain
QVQLVESGGGVVQPGRSLRLSCAASGFTFSSYGMHWVRQAPGKGLEWVAVVWYDGNNKHYADSVKGRFTISRDNSKNTLYLQMNSLRAEDTAVYYCVRGDLLGSFDYWGQGTLVTVSSA

SEQ ID NO: 8827 - protein, 125 aa, Homo sapiens
  REGION 1..125: note = Heavy chain
QVQLQQSGPGLVKPSQTLSLTCAISGDSVSSNRAAWNWIRQSPSRGLEWLGRTYYRSKWYNDYAVSVKSRITINPDTSKNQFSLQLNSVTPEDTAVYYCARDKVLLWFGEFDYWGQGTLVTVSSA

SEQ ID NO: 8828 - protein, 121 aa, Homo sapiens
  REGION 1..121: note = Heavy chain
EVQLVESGGGLVQPGRSQRLSCTASGFTFGDYAMTWIRQAPGKGLEWVGFIRSKTYGGTTEYAASVRDRFTISRDDSKSIAYLQMKSLKTEDTAVYYCSFRYTYGPFDYWGQGTLVTVSSA

SEQ ID NO: 8829 - protein, 119 aa, Homo sapiens
  REGION 1..119: note = Heavy chain
QVQLVESGGGVVQPGRSLRLSCAASGFTFSSYGMHWVRQAPGKGLEWVAVIWYDGSNKHYADSVKGRFIISRDNSKNTLYLQMNSLRAEDTAVYYCVRSGLVTPFDYWGQGTLVTVSSA

SEQ ID NO: 8830 - protein, 118 aa, Homo sapiens
  REGION 1..118: note = Heavy chain
QVQLVQSGAEVKKPGASVKVSCKASGYTFTSYGIGWVRQAPGQGLEWMGWISAYNGNTNYAQKLQGRVTMTTDTSTSTAYMELRSLRSDDTAVYYCARVGGATIDYWGQGTLVTVSSA

SEQ ID NO: 8831 - protein, 119 aa, Homo sapiens
  REGION 1..119: note = Heavy chain
QVQLVESGGGVVQPGRSLRLSCAASGFTFRSYGMHWVRQAPGKGLEWVAVTWYDGSNKNYADSVKGRFTISRDNSKNTLYLQMNSLRAEDTAVYYCARGGLTGDFNYWGQGTLVTVSLA

SEQ ID NO: 8832 - protein, 119 aa, Homo sapiens
  REGION 1..119: note = Heavy chain
QVQLVESGGGVVQPGRSLRLSCAASGFTFSSYGMHWVRQAPGKGLEWVAVIWYDGNNKHYADSVKGRSTISRDNSKNTLYLQMNSLRAEDTAVYYCARGGLLGCFDYWGQGTLVTVSSA

SEQ ID NO: 8833 - protein, 123 aa, Homo sapiens
  REGION 1..123: note = Heavy chain
QVQLQESGPGLVKPSETLSLTCTVSGVSISSYYWNWIRQPPGKGLEWLGYIYHSGSTNYNPSLKSRVTISVDTSKNQFSLKLSSVTAADTAVYYCARGGGLLWFGGIGMDVWGQGTEVTVSSA

SEQ ID NO: 8834 - protein, 119 aa, Homo sapiens
  REGION 1..119: note = Heavy chain
QVQLVESGGGVVQPGRSLRLSCAASGFTFSSYGMHWVRQAPGKGLEWVAVIWYDGSNKHYADSVEGRSTISRDNSKNTLYLQMNSLRAEDTAVYYCSRGELLGYFDYWGQGTLVTVSSA

SEQ ID NO: 8835 - protein, 119 aa, Homo sapiens; identical to SEQ ID NO: 8735
  REGION 1..119: note = Heavy chain

SEQ ID NO: 8836 - protein, 119 aa, Homo sapiens; identical to SEQ ID NO: 8779
  REGION 1..119: note = Heavy chain

SEQ ID NO: 8837 - protein, 119 aa, Homo sapiens
  REGION 1..119: note = Heavy chain
QVQLVESGGGVVQPGRSLRLSCAASGFTFSSYGMHWVRQAPGKGLEWVAVTWYDGSNKHCADSVKGRFTISRDNSKNTLYLQMNSLRAEDSAVYYCARGELLGYLDYWGQGTLVTVSSA

SEQ ID NO: 8838 - protein, 119 aa, Homo sapiens
  REGION 1..119: note = Heavy chain
QVQLVESGGGVVQPGRSLRLSCAASGFTFSSYGIHWVRQAPGKGLEWVAVIWYDGSNKHYADSVKGRFTISRDNSKNTLDLQMNSLRAEDTAVYYCARGGYFGCFDFWGQGTLVTVSSA

SEQ ID NO: 8839 - protein, 123 aa, Homo sapiens; identical to SEQ ID NO: 8812
  REGION 1..123: note = Heavy chain

SEQ ID NO: 8840 - protein, 119 aa, Homo sapiens; identical to SEQ ID NO: 8797
  REGION 1..119: note = Heavy chain

SEQ ID NO: 8841 - protein, 119 aa, Homo sapiens
  REGION 1..119: note = Heavy chain
QVQLVESGGGVVQPGGSLRLSCAASGFTFSSYGMHWVRQAPGKGLEWVTVMWYDGSNKHYADSVKGRFTISRDNSKNTLYLQMNSLRAEDTAVYYCVRGELLGYFDNWGQGTLVTVSSA

SEQ ID NO: 8842 - protein, 119 aa, Homo sapiens; identical to SEQ ID NO: 8773
  REGION 1..119: note = Heavy chain

SEQ ID NO: 8843 - protein, 119 aa, Homo sapiens; identical to SEQ ID NO: 8772
  REGION 1..119: note = Heavy chain

SEQ ID NO: 8844 - protein, 119 aa, Homo sapiens
  REGION 1..119: note = Heavy chain
QVQLVQSGAEVKKPGASVKVSCKASGYTFTSYGISWVRQAPGQGLEWMGWISAYNGNTNYAQKLQGRVTMTTDTSTSTAYMELRSLRSDDTAVYYCLTVAGPHVFDYWGQGTLVTVSSA

SEQ ID NO: 8845 - protein, 119 aa, Homo sapiens; identical to SEQ ID NO: 8773
  REGION 1..119: note = Heavy chain

SEQ ID NO: 8846 - protein, 119 aa, Homo sapiens; identical to SEQ ID NO: 8735
  REGION 1..119: note = Heavy chain

SEQ ID NO: 8847 - protein, 119 aa, Homo sapiens
  REGION 1..119: note = Heavy chain
QVQLVESGGGVVQPGSSLRLSCAASGFTFSSHGMHWVRQAPGKGLEWVAVIWYDGSNKHYADSVKGRFTTSRDNSKNTLHLQMNSLRAEDTAVYFCARGGYFGCFDYWGQGTLVTVSSA

SEQ ID NO: 8848 - protein, 119 aa, Homo sapiens
  REGION 1..119: note = Heavy chain
QVQLVESGGGVVQPGRSLRLSCAASGFTFSSYGMHWVRQAPGKGLEWVAVIWYDGSNKHYADSVKGRFTISRDNSKNTLYLQMNSLRAEDTAVYYCARGSKLGPFDYWGQGTLVTVSSA

SEQ ID NO: 8849 - protein, 119 aa, Homo sapiens
  REGION 1..119: note = Heavy chain
QVQLVESGGGVVQPGRSLRLSCAASGFTFSSYGIHWVRQAPGKGLEWVAVIWYDGSNKHYADSVKGRFTISRDNSKNTLYLEMNSLRAEDTAVYYCARGGYFGCFDQWGQGTLVTVSSA

SEQ ID NO: 8850 - protein, 119 aa, Homo sapiens; identical to SEQ ID NO: 8847
  REGION 1..119: note = Heavy chain

SEQ ID NO: 8851 - protein, 119 aa, Homo sapiens
  REGION 1..119: note = Heavy chain
QVQLVESGGGVVQPGRSLRLSCAASGFTFSSYGIHWVRQAPGKGLEWVAVIWYDGSNKHYADSVRGRSTISRDNSKNTLYLQMNSLRAEDTAVYFCARGDLLGYFDYWGQGTLVTVSSA

SEQ ID NO: 8852 - protein, 119 aa, Homo sapiens
  REGION 1..119: note = Heavy chain
QVQLVESGGGVVQPGRSLRLSCAASGFTFSSYGIHWVRQAPGKGLEWVAVIWYDGSNKNYADSVKGRFTISRDNSKNTLYLQMNSLRAEDTAVYYCARGELLGYFDYWGQGTLVTVSSA

SEQ ID NO: 8853 - protein, 119 aa, Homo sapiens
  REGION 1..119: note = Heavy chain
QVQLVESGGGVVQPGRSLRLSCAASGFTFSSYGTHWVRQAPGKGLEWVAVIWYDGSNKYYADSVKGRFTISRDNSKNTLYLQMNSLRAEDTAIYYCARAGNWGAFDIWGQGTMVTVSSA

SEQ ID NO: 8854 - protein, 119 aa, Homo sapiens
  REGION 1..119: note = Heavy chain
QVQLVESGGGVVQPGRSLRLSCAASGFTFSSYGMHWVRQAPGKGLEWVAVMWYDGSNKHCADSVKGRFTISRDNSKNTLYLQMNSLRAEDTAVYYCVRGELLGYFDNWGQGTLVTVSSA

SEQ ID NO: 8855 - protein, 119 aa, Homo sapiens; identical to SEQ ID NO: 8740
  REGION 1..119: note = Heavy chain

SEQ ID NO: 8856 - protein, 119 aa, Homo sapiens
  REGION 1..119: note = Heavy chain
QVQLVESGGGVVQPGKSLRLSCAASGFTFSSYGIHWVRQAPGKGLEWVAVIWYDGSNKHYADSVKGRFTISRDNSKNTLYLQMNSLRAEDTAVYYCARGELLGYFDNWGQGTLVTVSSA

SEQ ID NO: 8857 - protein, 122 aa, Homo sapiens
  REGION 1..122: note = Heavy chain
QVQLVESGGGVVQPGRSLRLSCAASGFTFSNYAMHWVRQAPGKGLEWVAVVWYDGNHKYYADSVRGRFTISRDNSNNTLYLQMNSLRAEDTAVYYCAREKGSGWYEGMDVWGQGTTVTVSSA

SEQ ID NO: 8858 - protein, 119 aa, Homo sapiens
  REGION 1..119: note = Heavy chain
QVQLVESGGGVVQPGRSLRLSCAASGFTFSSYGMHWVRQAPGKGLEWVAVIWYDGSNKHYADSVKGRFTISRDNSKNTLYLQMNSLRAEDTAVYYCARGAKLGPFDYWGQGTLVTVSSA

SEQ ID NO: 8859 - protein, 119 aa, Homo sapiens
  REGION 1..119: note = Heavy chain
QVQLVESGGGVVQPGMSLRLSCAASGFTFSSYGMHWVRQAPGKGLEWVAVIWYDGNNRHYADSVKGRFTISRDSSKNTLYLQMNSLRAEDTAVYYCARGGRLGAFDYWGQGTLVTVSSA

SEQ ID NO: 8860 - protein, 119 aa, Homo sapiens
  REGION 1..119: note = Heavy chain
QVQLVESGGGVVQPGRSLRLSCAASGFTFSSYGMHWVRQAPGKGLEWVAVIWYDGSNKYYADSVKGRFTISRDKSKNTLYLQMNSLRAEDTAVHYCARGGYLGAFDIWGQGTMVTVSSA

SEQ ID NO: 8861 - protein, 119 aa, Homo sapiens
  REGION 1..119: note = Heavy chain
QVQLVESGGGVVQPGRSLRLSCAASGFTFSSHGMHWVRQAPGKGLEWVAVTWYDGSNKHYADSVKGRATISRDNSKNTLYLQMNSLRAEDTAVYYCTRGELLGHFDYWGQGTLVTVSSA

SEQ ID NO: 8862 - protein, 119 aa, Homo sapiens
  REGION 1..119: note = Heavy chain
QVQLVESGGGVVQPGRSLRLSCAASGFTFSSYGIHWVRQAPGKGLEWVAVIWYDGSNKHYADSVKGRFTISRDNSKNTLYLEMNSLRAEDTAVYYCARGGYFGCFDPWGQGTLVTVSSA

SEQ ID NO: 8863 - protein, 119 aa, Homo sapiens
  REGION 1..119: note = Heavy chain
QVQLVESGGGVVQPGSSLRLSCAASGFTFSSHGMHWVRQAPGKGLEWVAVIWYDGSNKHYADSVKGRFTTSRDNSKNTLHLQMNSLRAEDTAVYFCARGGYFGCFDSWGQGTLVTVSSA

SEQ ID NO: 8864 - protein, 119 aa, Homo sapiens; identical to SEQ ID NO: 8852
  REGION 1..119: note = Heavy chain

SEQ ID NO: 8865 - protein, 119 aa, Homo sapiens; identical to SEQ ID NO: 8847
  REGION 1..119: note = Heavy chain

SEQ ID NO: 8866 - protein, 119 aa, Homo sapiens
  REGION 1..119: note = Heavy chain
QVQLVESGGGVVQPGRSLRLSCAASGFTFSSHGMHWVRQAPGKGLEWVAVTWYDGSNKHYADSVKGRATISRDNSKNTLYLQMNSLRAEDTAVYYCTRGELLGYVDYWGQGTLVTVSSA

SEQ ID NO: 8867 - protein, 119 aa, Homo sapiens; identical to SEQ ID NO: 8735
  REGION 1..119: note = Heavy chain

SEQ ID NO: 8868 - protein, 119 aa, Homo sapiens
  REGION 1..119: note = Heavy chain
QVQLVESGGGVVQPGSSLRLSCAASGFTFSSHGMHWVRQAPGKGLEWVAVIWYDGSNKHYADSVKGRFTTSRDNSKNTLHLQMNSLRAEDTAVYFCARGGYFGCVDYWGQGTLVTVSSA

SEQ ID NO: 8869 - protein, 119 aa, Homo sapiens
  REGION 1..119: note = Heavy chain
QVQLVESGGGVVQPGRSLRLSCAASGFTFSSHGMHWVRQAPGKGLEWVAVTWYDGSNKHYADSVKGRATISRDNSKNTLYLQMNSLRAEDTAVYYCTRGDLLGYFDYWGRGTLVTVSSA

SEQ ID NO: 8870 - protein, 123 aa, Homo sapiens
  REGION 1..123: note = Heavy chain
QVQLVESGGGVVQPGRSLRLSCAASGFTFSSYGMHWVRQAPGKGLEWVAVIWYDGRNKDYADSVKGRITISRDNSKNTLYLQMNSLRAEDTAVYYCARGGLLGPYFDYWGQGTLVTVSSAKTT

SEQ ID NO: 8871 - protein, 123 aa, Homo sapiens
  REGION 1..123: note = Heavy chain
QVQLVESGGGVVQPGRSLRLSCAASGFTFSSYGMNWVRQAPGKGLEWVAVIWYDGRNKHYADSVKGRFTISRDNSKNTLYLQMNSLRAEDTAVYYCARGGDWGPYFDYWGQGTLVTVSSAKTT

SEQ ID NO: 8872 - protein, 123 aa, Homo sapiens
  REGION 1..123: note = Heavy chain
QVQLVESGGGVVQPGRSLRLSCIASGFTFSSYGMHWVRQAPGKGLEWVAVNWYDGSNKHYADSVKGRFTISRDNSKNTLYLQMNSLRAEDTAVYYCARGGVWGPYFDYWGQGTLVTVSSAKTT

SEQ ID NO: 8873 - protein, 122 aa, Homo sapiens
  REGION 1..122: note = Heavy chain
QVQLVESGGGVVQPGRSLRLSCAASGFTFSSYGMHWVRQAPGTGLEWVAVIWYEGRNKYYADPVKGRFTISRDNSKNTLYLQMNSLRDDDTAVYYCARAGDLGAFDIWGQGTMVTVSSAKTT

SEQ ID NO: 8874 - protein, 121 aa, Homo sapiens
  REGION 1..121: note = Heavy chain
QVQLVQSGAEVKKPGASVKVSCKASGYTFTDYGISWVRQAPGQGLECMGWISAYNGNTNYAQNLQGRVTMTTDTSTNTAYMELRSLRSDDTAVYYCARVGAGDWDYWGQGTLVTVSSAKTT

SEQ ID NO: 8875 - protein, 122 aa, Homo sapiens
  REGION 1..122: note = Heavy chain
QVQLVESGGGVVQPGRSLRLSCAASGFTLSSFGMHWVRQAPGKGLEWVAVIWYDGSNKYYADSVKGRFIISRDNSKTALYLQMNSLRAEDTAVYYCARAHYFGAFDIWGQGTMVTVSSAKTT

SEQ ID NO: 8876 - protein, 122 aa, Homo sapiens
  REGION 1..122: note = Heavy chain
EVQLVESGGGLVQPGGSLRLSCAASGFTFSNYAMSWVRQAPGKGLEWVSAISGGGLSTYYADSVKGRFTISRDNSKNTLYLQMNSLRAEDTAVYYCAKDLLWLGFDYWGQGTLVTVSSAKTT

SEQ ID NO: 8877 - protein, 123 aa, Homo sapiens; identical to SEQ ID NO: 8871
  REGION 1..123: note = Heavy chain

SEQ ID NO: 8878 - protein, 122 aa, Homo sapiens
  REGION 1..122: note = Heavy chain
QVQLVESGGGVVQPGRSLRLSCAASGFTFRSYGMHWVRQAPGKGLEWVAVIWYDGSNKHYADSVKGRFTISRDNSKNTLYLQMNSLRAEDTAVYYCARNGLIGAFDIWGQGTMVTVSSAKTT

SEQ ID NO: 8879 - protein, 122 aa, Homo sapiens
  REGION 1..122: note = Heavy chain
QVQLVESGGGVVQPGRSLRLSCAASGFTFSSYGIHWVRQAPGKGLEWVAVIWYEGSNKFYADSVKGRFTISRDNSKNTLSLQMNSLRAEDTAVYYCARAGHLGAFDIWGQGTMVTVSSAKTT

SEQ ID NO: 8880 - protein, 122 aa, Homo sapiens; identical to SEQ ID NO: 8873
  REGION 1..122: note = Heavy chain

SEQ ID NO: 8881 - protein, 122 aa, Homo sapiens
  REGION 1..122: note = Heavy chain
EVQLVESGGGLVQPGGSLRLSCAASGFTFSSYAMSWVRQAPGKGLEWVSGISGSGGSTYYADSVKGRFTISRDNSKNTLYLQMNSLRAEDTAVYYCAKLGIAWYFDVWGRGTLVTVSSAKTT

SEQ ID NO: 8882 - protein, 122 aa, Homo sapiens
  REGION 1..122: note = Heavy chain
QVQLVESGGGVVQPGRSLRLSCAASGFTFSSYGIHWVRQAPGKGLEWVAVIWYDGSNKYYADSVKGRFTISRDNSKNTLYLQMNSLRAEDTAVYYCARAGDLAAFDIWGQGTMVTVSSAKTT

SEQ ID NO: 8883 - protein, 122 aa, Homo sapiens
  REGION 1..122: note = Heavy chain
QVQLVESGGGVVQPGRSLRLSCAASGFTFSRFGMHWVRQAPGKGLEWVAVIWYDGSNKHYADSVKDRFTISRDNSKNTLSLQMNSLRAEDTAVYYCARGGQLGPFDYWGQGILVTVSSAKTT

SEQ ID NO: 8884 - protein, 120 aa, Homo sapiens
  REGION 1..120: note = Heavy chain
QVQLVQSGAEVKKPGASVKVSCKASGYTFNYYGISWVRQAPGQGLEWMGWISVYNGNTNYVKKFQGRVTMTTDTSTNTAYMELRSLRSDDTAVYYCARWVRGVDYWGQGTLVTVSSAKTT

SEQ ID NO: 8885 - protein, 123 aa, Homo sapiens
  REGION 1..123: note = Heavy chain
QVQLVESGGGVVQPGRSLRLSCAASGFTLSSFGMHWVRQAPGKGLEWVAVIWYDGRNKYYEDSVKGRFTISRDNSNNTLYLQMNSLRAEDTAVYYCARGEYFGEFFDYWGQGTLVTVSSAKTT

SEQ ID NO: 8886 - protein, 122 aa, Homo sapiens
  REGION 1..122: note = Heavy chain
QVQLVESGGGVVQPGRSLRLSCAASGFTFSNYGIHWVRQTPGKGLEWVAVIWYDGSNRYYADSVKGRFTVSGDNSKNTLYLQMNSLRAEDTAVYYCARASLTGSFDYWGQGTLVTVSSAKTT

SEQ ID NO: 8887 - protein, 122 aa, Homo sapiens
  REGION 1..122: note = Heavy chain
QVQLVESGGGVVQPGRSLRLSCAASGFTFNSYGVHWVRQAPGKGLEWVAVIWYEGSNKFYADSVKGRFTISRDNSKNTLFLQMNSLRAEDTAVYYCVRAGYLGAFDIWGQGTMVTVSSAKTT

SEQ ID NO: 8888 - protein, 127 aa, Homo sapiens
  REGION 1..127: note = Heavy chain
QVQLVESGGGVVQPGRSLRLSCAASGFTFSSYGMHWVRQAPGKGLEWVAVIWYDGSYKYYADSVKGRFTISRDDSKNTLYLQMSSLRAEDTAVYYCARAPHYAILTGYYEDYWGQGTLVTVSSAKTT

SEQ ID NO: 8889 - protein, 124 aa, Homo sapiens
  REGION 1..124: note = Heavy chain
QVQLVQSGAEVKKPGASVKVSCKASDYTFTYYGISWVRQAPGQGLEWMGWISAYNGNTNYAQKLQGRVTMTTDTSTNTAYLELRSLRSDDTAVYYCARDYYDSSGYFDYWGQGTLVTVSSAKTT

SEQ ID NO: 8890 - protein, 122 aa, Homo sapiens
  REGION 1..122: note = Heavy chain
QVQLVQSGAEVKKPGASVKVSCKASGYTFTSYGISWVRQAPGQGLEWMGWISAYNGNTYYAQKFQGRVTMTTDTSTSTAYVELRSLRSDDTAVYYCARVTGRDAFDIWGQGTMVTVSSAKTT

SEQ ID NO: 8891 - protein, 124 aa, Homo sapiens
  REGION 1..124: note = Heavy chain
QVQLVESGGGVVQPGRSLRLSCAASGFTFSSYGMHWVRQAPGKGLEWVAVIWYDGNNKYYADSVKGRFTISRDNSKNTLYLQMYSLRAEDTAVYYCARGGILAAGIFDYWGQGTLVTVSSAKTT

SEQ ID NO: 8892 - protein, 126 aa, Homo sapiens
  REGION 1..126: note = Heavy chain
QVQLVESGGGVVQPGRSLRLSCAASGFTFSSYGMHWVRQAPGKGLEWVAVIWYDGNNKYYADSVKGRFTISRDNSKNTLYLQMNSLRADDTAVYYCARMLRGAPYYYGMDVWGQGTTITVSSAKTT

SEQ ID NO: 8893 - protein, 122 aa, Homo sapiens; identical to SEQ ID NO: 8886
  REGION 1..122: note = Heavy chain

SEQ ID NO: 8894 - protein, 121 aa, Homo sapiens
  REGION 1..121: note = Heavy chain
QVQLVQSGAEVKKPGASVKVSCKASGYTFTSYGISWVRQAPGQGLECMGWISAYNGNTNYAQKFQGRVTMITDTSTSTAYMELRSLRSDDTAVYYCARVGPINLDYWGQGTLVTVSSAKTT

SEQ ID NO: 8895 - protein, 122 aa, Homo sapiens
  REGION 1..122: note = Heavy chain
QVQLVESGGGVVQPGRSLRLSCAASGFTFSSYGMHWVRQAPGKGLEWVAVIWYDGRNKHYADSVKGRFIISRDNSKNTLYLQMNSLRAEDTAVYYCARGSQLGPFDYWGQGTLVTVSSAKTT

SEQ ID NO: 8896 - protein, 123 aa, Homo sapiens; identical to SEQ ID NO: 8870
  REGION 1..123: note = Heavy chain

SEQ ID NO: 8897 - protein, 123 aa, Homo sapiens
  REGION 1..123: note = Heavy chain
QVQLVESGGGVVQPGRSLRLSCAASGFTFSSHGMHWVRQAPGKGLEWVAVIWYDGSNKHYADSVKGRFTISRDNSKNTLYLQMNSLRAEDTAVYYCARGDILTGYYGYWGQGTLVTVSSAKTT

SEQ ID NO: 8898 - protein, 123 aa, Homo sapiens
  REGION 1..123: note = Heavy chain
QVQLVESGGGVVQPGRSLRLSCTASGFTFSSYGMHWVRQAPGKGLEWVAVSWYDGSNKHYVDSVKGRFTISRDNSKNTLYLQMNSLRVEDTAVYYCARGGVWGSYFDYWGQGTLVTVSSAKTT

SEQ ID NO: 8899 - protein, 123 aa, Homo sapiens; identical to SEQ ID NO: 8870
  REGION 1..123: note = Heavy chain

SEQ ID NO: 8900 - protein, 121 aa, Homo sapiens
  REGION 1..121: note = Heavy chain
QVQLVQSGAEVKKPGASVKVSCKASGYTFTSYGISWVRQAPGQGLEWMGWISAYNGNTNYAQNLQGRVTMTTDTSTSTAYMELRSLRSDDTAVYYCARVGPTNLDYWGQGTLVTVSSAKTT

SEQ ID NO: 8901 - protein, 120 aa, Homo sapiens
  REGION 1..120: note = Heavy chain
QVQLVQSGDEVKKPGASVKVSCKASGYTFTSYGISWVRQAPGQGLEWMGWISAYNGNTNYAQKFQGRVTMTTDTSTSTAYMELRSLRSDDTAVYYCAKVSGYFDYWGQGTLVTVSSAKTT

SEQ ID NO: 8902 - protein, 127 aa, Homo sapiens
  REGION 1..127: note = Heavy chain
QVQLVESGGGVVQPGRSLRLSCAASGFTLSSYGMHWVRQAPGKGLEWVAVIWYDGSNKYYADSVKGRFTISRDNSKNTLYLQMNSLRAEDTAVYYCARAPHYGILTGYYEDYWGQGTLVTVSSAKTT

SEQ ID NO: 8903 - protein, 122 aa, Homo sapiens
  REGION 1..122: note = Heavy chain
QVQLVESGGGVVQPGRSLRLSCAASGFTFSSYGMHWVRQAPGKGLEWVAVIWYDGRNKYYADPVKGRFTISRDNSKNTLYLQMNSLRDEDTAVYYCARAGYLGAFDIWGQGTMVTVSSAKTT

SEQ ID NO: 8904 - protein, 122 aa, Homo sapiens
  REGION 1..122: note = Heavy chain
QVQLVESGGGVVQPGRSLRLSCAASGFTFSSYGMHWVRQAPGKGLEWVAVVLYDGNNKYYADSVKGRFTISRDNSKNTLYLQMNSLRAEDTAVYYCARGGLTGPFDYWGQGTLVTVSSAKTT

SEQ ID NO: 8905 - protein, 122 aa, Homo sapiens
  REGION 1..122: note = Heavy chain
QVQLVESGGGVVQPGRSLRLSCAASGFIFSSYGMHWVRQAPGKGLEWVAVIWYDGRNKNYVDSVKGRFTISRDNSKNTLYLEMNSLRAEDTAVYYCARGGYWGSFDYWGQGTLVTVSSAKTT

SEQ ID NO: 8906 - protein, 122 aa, Homo sapiens; identical to SEQ ID NO: 8875
  REGION 1..122: note = Heavy chain

SEQ ID NO: 8907 - protein, 121 aa, Homo sapiens
  REGION 1..121: note = Heavy chain
QVQLVQSGAEVKKPGASVKVSCKASGYTFTSYGIGWVRQAPGQGLEWMGWISAYNGNTNYAQKLQGRVTMTTDTSTSTAYMELRSLRSDDTAVYYCARVRGGGLDVWGQGTTVTVSSAKTT

SEQ ID NO: 8908 - protein, 122 aa, Homo sapiens
  REGION 1..122: note = Heavy chain
QVQLVESGGGVVQPGRSLRISCAASGFTFSSYGIHWVRQAPGKGLQWVAVIWYDGRNKYYADSVKGRFTISRDNSKNTLYLQMNSLRAEDTAVYYCSRSGSFGAFDIWGQGTMVTVSSAKTT

SEQ ID NO: 8909 - protein, 124 aa, Homo sapiens; identical to SEQ ID NO: 8891
  REGION 1..124: note = Heavy chain

SEQ ID NO: 8910 - protein, 122 aa, Homo sapiens
  REGION 1..122: note = Heavy chain
QVQLVESGGGVVQPGRSLRLSCAASGFTFSRYGMHWVRQAPGKGLEWVAVIWYDGRNKYYADSVKGRFTISRDNSKNTLYLQMNSLRAEDTALYSCARAGELGPFDYWGQGTLVTVSSAKTT

SEQ ID NO: 8911 - protein, 124 aa, Homo sapiens
  REGION 1..124: note = Heavy chain
QVQLVESGGGVVQPGRSLRLSCAASGFTFSSYGMHWVRQAPGKGLEWVAVIWYDGNNKYYADSVKGRFTISRDNSKNTLYLQMNGLRAEDTAMYYCVRGSIVAAGLFDYWGQGTLVTVSSAKTT

SEQ ID NO: 8912 - protein, 126 aa, Homo sapiens
  REGION 1..126: note = Heavy chain
QVQLVESGGGVVQPGRSLRLSCAASGFTFSSYGMHWVRQAPGKGLEWVAVIWYDVGNKYYIDSVKGRFTISRDNSKNTLYLQMNSLRAEDTAVYYCARDYYGSGSPRHFDYWGQGTLVTVSSAKTT

SEQ ID NO: 8913 - protein, 122 aa, Homo sapiens
  REGION 1..122: note = Heavy chain
QVQLVESGGGVVQPGRSLRLSCAASGFTFSSYGMNWVRQAPGKGLEWVAVIWYDGSNKHYADSVKGRFTISRDNSKNTLYLQMNSLRAEDTAVYYCARVHYFGAFDIWGQGTMVTVSSAKTT

SEQ ID NO: 8914 - protein, 121 aa, Homo sapiens
  REGION 1..121: note = Heavy chain
QVQLVQSGAEVKKPGASVKVSCKASGYTFTNYGISWVRQAPGQGLECMGWISAYNGNTNYAQKFQGRVTMTTDTSTSTAYMELRSLRSDDTAVYYCARVAAAGFDYWGQGTLVAVSSAKTT

SEQ ID NO: 8915 - protein, 122 aa, Homo sapiens
  REGION 1..122: note = Heavy chain
QVQLVESGGGVVQPGRSLRLSCAASGFTFSSHGMHWVRQAPGKGLEWVAVIWYDGINKYYADSVRGRFTISRDNSNNTLYLQLNSLRAEDTAVYYCARNSLLTGWDYWGQGTLVTVSSAKTT

SEQ ID NO: 8916 - protein, 123 aa, Homo sapiens; identical to SEQ ID NO: 8870
  REGION 1..123: note = Heavy chain

SEQ ID NO: 8917 - protein, 121 aa, Homo sapiens
  REGION 1..121: note = Heavy chain
QVQLVQSGAEVKKPGASVKVSCKASGYTFTNYGISWVRQAPGQGLEWMGWISVYNGNTNYAQKFQGRVTMTTDTSTSTAYMELRSLISDDTAVYYCARLGKGLFDYWGQGTLVTVSSAKTT

SEQ ID NO: 8918 - protein, 123 aa, Homo sapiens; identical to SEQ ID NO: 8898
  REGION 1..123: note = Heavy chain

SEQ ID NO: 8919 - protein, 128 aa, Homo sapiens
  REGION 1..128: note = Heavy chain
QVQLVESGGGVVQPGRSLRLSCAASGFTFSSYGMHWVRQAPGKGLEWVAVIWYDGSNKYYADSVRGRFTISRDNSKNTLYLQMNSLRAEDTAVYYCARDRYDILTGPYWYFDLWGRGTLVTVSSAKTT

SEQ ID NO: 8920 - protein, 122 aa, Homo sapiens
  REGION 1..122: note = Heavy chain
QVQLVQSGAEVKKPGASVKVSCKASGYTFTNYGISWVRQAPGQGLEWMGWISVYNGNTNYVQKFQGRVTMSTDTSTNTAHMELRSLRSDDTAVYYCARVGVRGIFDYWGQGTLVTVSSAKTT

SEQ ID NO: 8921 - protein, 121 aa, Homo sapiens
  REGION 1..121: note = Heavy chain
QVQLVQSGAEVKKPGASVKVSCKASGYTFTSYGIGWVRQAPGQGLELMGWISAYNGNTNYAQKLQGRVTMTTDTSTNTAYMELRSLRSDDTAVYYCARVRGGGMDVWGQGTTVTVSSAKTT

SEQ ID NO: 8922 - protein, 123 aa, Homo sapiens; identical to SEQ ID NO: 8870
  REGION 1..123: note = Heavy chain

SEQ ID NO: 8923 - protein, 123 aa, Homo sapiens; identical to SEQ ID NO: 8872
  REGION 1..123: note = Heavy chain

SEQ ID NO: 8924 - protein, 124 aa, Homo sapiens
  REGION 1..124: note = Heavy chain
QVQLVESGGGVVQPGRSLRLSCAASGFTFSSYGMHWVRQAPGKGLEWVAVIWYDGSNKYYADSVKGRFTISRDNSKNTLYLQMNSLRAEDTAVYYCARGGIVAAGILDYWGQGTLVTVSSAKTT

SEQ ID NO: 8925 - protein, 120 aa, Homo sapiens
  REGION 1..120: note = Heavy chain
QVQLVQSGAEVKKPGASVKVSCKASGYTFTNYGITWVRQAPGQGLEWMGWISAYNGNTNYAQKLQGRVTMTTDTSTSTAYMELRSLRSDDTAVYYCARVAPYFDYWGQGTLVTVSSAKTT

SEQ ID NO: 8926 - protein, 120 aa, Homo sapiens
  REGION 1..120: note = Heavy chain
QVQLVQSGAEVKKPGASVRVSCKASGYTFTSYGISWVRQAPGQGLEWMGWISAYNGNTNYAQKLQGRVTMTTDTSTSTAYMELRSLRSDDTAVYYCARFIYGMDVWGQGTTVTVSSAKTT

SEQ ID NO: 8927 - protein, 121 aa, Homo sapiens
  REGION 1..121: note = Heavy chain
QVQLVQSGAEVKKPGASVKVSCKASGYTFTSYGISWVRQAPGQGLECMGWISAYNGNTNYAQKLQGRVTMTTDTSTSTAYMELRSLRSDDTAVYYCARVGATNLDYWGQGTLVTVSSAKTT

SEQ ID NO: 8928 - protein, 122 aa, Homo sapiens
  REGION 1..122: note = Heavy chain
QVQLVESGGGVVQPGRSLRLSCAASGFTFSSNGMHWVRQAPGKGLEWVSVIWYDGNNKFYADSVKGRFTISRDNSKNTLYLQMNSLRAEDTAVYYCARAGHLGPFDYWGQGTLVTVSSAKTT

SEQ ID NO: 8929 - protein, 122 aa, Homo sapiens
  REGION 1..122: note = Heavy chain
QVQLVESGGGVVQPGRSLRLSCGASGFTFSSYGMHWVRQAPGKGLEWVAVIWYDGRNKYYEDSVKGRFTISRDNSKNTLYLQMNSLRAEDTAVYYCARAGLLGYFDYWGQGTLVTVSSAKTT

SEQ ID NO: 8930 - protein, 122 aa, Homo sapiens
  REGION 1..122: note = Heavy chain
QVQLVESGGGVVQPGRSLRLSCAASGFTFSSYGMHWVRQAPGKGLEWVAVIWYDGSNKFYADSVKGRFTISSDNSKNTRYLQMNSLRAEDTAVYYCARGGHLGSFDYWGQGTLVTVSSAKTT

SEQ ID NO: 8931 - protein, 121 aa, Homo sapiens
  REGION 1..121: note = Heavy chain
QVQLVQSGAEVKKPGASVKVSCKASGYTFTSYGIGWVRQAPGQGLEWMGWISAYNGNTNYAQKLQGRVTMTTDTSTSTAYMELRSLRSDDTAVYYCARVRGGGVDVWGQGTTVTVSSAKTT

SEQ ID NO: 8932 - protein, 122 aa, Homo sapiens
  REGION 1..122: note = Heavy chain
QVQLVESGGGVVQPGRSLRLSCAASGFTFSRYGMHWVRQAPGKGLEWVAVTWYDGSNKHYADSVRGRFTISRDNSKNTLYLQMNSLRAEDTAVYCCARSGSFGAFDIWGQGTMVTVSSAKTT

SEQ ID NO: 8933 - protein, 120 aa, Homo sapiens
  REGION 1..120: note = Heavy chain
QVQLVQSGAEVKKPGASVKVSCKASGYTFTNYGINWVRQAPGQGLEWMGWISAYNGNTNYAQKFQGRVTMTTDTSTSTAYMELRNLRSDDTAVYYCARLGHYIDYWGQGTLVTVSSAKTT

SEQ ID NO: 8934 - protein, 122 aa, Homo sapiens
  REGION 1..122: note = Heavy chain
QVQLVESGGGVVQPGRSLRLSCAATGFNFSSYGIHWVRLAPGKGLEWVAVIWYDGSNRYYADSVKGRFTISRDTSKNTLYLQMNSLRAEDTAVYYCARAGLWSAFDIWGRGTMVSVSSAKTT

SEQ ID NO: 8935 - protein, 122 aa, Homo sapiens
  REGION 1..122: note = Heavy chain
QVQLVESGGGVVQPGRSLRLSCAASGFTFSSYGIHWVRQAPGKGLEWVAVIWYDGRNKHYADSVKGRFTISRDNSKNTLYLQMNSLRAEDTAVYYCARQDYWGPFDYWGQGTLVTVSSAKTT

SEQ ID NO: 8936 - protein, 121 aa, Homo sapiens
  REGION 1..121: note = Heavy chain
QVQLVQSGAEVKKPGASVKVSCKASGYTFTSYGISWVRQAPGQGLECMGWISAYNGNTNYAQKLQGRVTMTTDTSTSTAYMELRSLRSDDTAVYYCARVGIGAFDIWGQGTMVTVSSAKTT

SEQ ID NO: 8937 - protein, 123 aa, Homo sapiens; identical to SEQ ID NO: 8871
  REGION 1..123: note = Heavy chain

SEQ ID NO: 8938 - protein, 127 aa, Homo sapiens
  REGION 1..127: note = Heavy chain
QVQLVESGGGVVQPGRSLRLSCAASGFTFSSYGMHWVRQAPGKGLEWVALIWYDGSYKYYADSVKGRFTISRDNSKNTLYLQMNSLRAEDTAVYYCASAYYDLLTGPYYFDYWGQGTLVTVSSAKTT

SEQ ID NO: 8939 - protein, 122 aa, Homo sapiens; identical to SEQ ID NO: 8873
  REGION 1..122: note = Heavy chain

SEQ ID NO: 8940 - protein, 123 aa, Homo sapiens
  REGION 1..123: note = Heavy chain
QVQLVESGGGVVQPGRSLRLSCAASGFTFSSYGMHWVRQAPGKGLEWVAVIWYDGRNKHYADSVKGRFTISRDNSKNTLYLQMNSLRAEDTAVYYCARGEWFGEFFDYWGQGTLVTVSSAKTT

SEQ ID NO: 8941 - protein, 121 aa, Homo sapiens
  REGION 1..121: note = Heavy chain
QVQLVESGGGVVQPGRSLRLSCAASGFTFRSYGMHWVRQAPGKGLEWVAVIWYDGRNKHYADSVKGRFTISRDNSKNTLYLQMNSLRAEDTAVYYCARSIVGAFDYWGQGTLVTVSSAKTT

SEQ ID NO: 8942 - protein, 122 aa, Homo sapiens
  REGION 1..122: note = Heavy chain
QVQLVESGGGVVQPGRSLRLSCEASGFTFSSHGMHWVRQAPGKGLEWVAVIWYDGSNKHYADFVKGRFTISRDNSKNTLYLQVNSLRAEDTAVYYCARGHYFGAFDIWGQGTMVTVSSAKTT

SEQ ID NO: 8943 - protein, 123 aa, Homo sapiens; identical to SEQ ID NO: 8870
  REGION 1..123: note = Heavy chain

SEQ ID NO: 8944 - protein, 125 aa, Homo sapiens
  REGION 1..125: note = Heavy chain
QVQLVESGGGVVQPGRSLRLSCAASGFTFSSYGMHWVRQAPGKGLEWVAVISYDGSNKYYADSVKGRFTISRDNSKNTLYLQMNSLRAEDTAVYYCAREDYYGSGRNYYGMDVWGQGTTVTVSSA

SEQ ID NO: 8945 - protein, 122 aa, Homo sapiens; identical to SEQ ID NO: 8910
  REGION 1..122: note = Heavy chain

SEQ ID NO: 8946 - protein, 122 aa, Homo sapiens
  REGION 1..122: note = Heavy chain
QVQLVESGGGVVQPGRSLRLSCEASGFTFSSYGMNWVRQAPGKGLEWVAVIWYDGRNKHYTDSVKGRFTISRDNSKNTLYLQMNSLRAEDTAVYYCARAHYFGAFDIWGQGTMVTVSSAKTT

SEQ ID NO: 8947 - protein, 123 aa, Homo sapiens
  REGION 1..123: note = Heavy chain
QVQLVESGGGVVQPGRSLRLSCAASGFTFSNYGMNWVRQAPGKGLEWVAVIWYDGRNKHYADSVKGRFTISRDNSKNTLYLQMNSLRAEDTAVYYCARGGDWGPYFDYWGQGTLVTVSSAKTT

SEQ ID NO: 8948 - protein, 122 aa, Homo sapiens; identical to SEQ ID NO: 8873
  REGION 1..122: note = Heavy chain

SEQ ID NO: 8949 - protein, 123 aa, Homo sapiens
  REGION 1..123: note = Heavy chain
QVQLVESGGGVVQPGRSLRLSCAASGFTLSNYGMHWVRQAPGKGLEWVAVIWYDGRNKHYADSVEGRFTLSRDNSKNTLYLQMNSLRAEDTAVYYCARGGVWGSYFDYWGQGTLVTVSSAKTT

SEQ ID NO: 8950 - protein, 122 aa, Homo sapiens
  REGION 1..122: note = Heavy chain
QVQLVESGGGVVQPGRSLRLSCAASGFTFSSYGIHWVRQAPGKGLEWVAVIWYDGSNKYYADSVKGRFTISRDNSKNTLYLQMNSLRAEDTAVYYCARGSLLGPFDYWGQGTLVTVSSAKTT

SEQ ID NO: 8951 - protein, 120 aa, Homo sapiens
  REGION 1..120: note = Heavy chain
QVQLVQSGAEVKKPGASVKVSCKASGYTFTSYGISWVRQAPGQGLEWMGWISAYNGNTNYAQKLQGRVTMTTDTSTSTAYMELRSLRSDDTAVYYCGRWVRGVEYWGQGTLVTVSSAKTT

SEQ ID NO: 8952 - protein, 123 aa, Homo sapiens; identical to SEQ ID NO: 8947
  REGION 1..123: note = Heavy chain

SEQ ID NO: 8953 - protein, 126 aa, Homo sapiens
  REGION 1..126: note = Heavy chain
QVQLVESGGGVVQPGRSLRLSCAASGFTFSSYGMHWVRQAPGKGLEWVAVIWFDGNNKYYADSVKGRFTISRDNSKNTLYLQMNSLRADDTAVYYCARMLRGAPYYYGMDVWGQGTTITVSSAKTT

SEQ ID NO: 8954 - protein, 123 aa, Homo sapiens
  REGION 1..123: note = Heavy chain
QVQLVESGGGVVQPGRSLRLSCAASGFTFSSFGMHWVRQAPGKGLEWVAVIWYDGRNKYYVDSVKGRFTISRDNSNNTLYLQMNSLRAEDTAVYYCARGEFFGEFFDYWGQGTLVTVSSAKTT

SEQ ID NO: 8955 - protein, 122 aa, Homo sapiens; identical to SEQ ID NO: 8873
  REGION 1..122: note = Heavy chain

SEQ ID NO: 8956 - protein, 127 aa, Homo sapiens
  REGION 1..127: note = Heavy chain
QVQLVQSGAEVKKPGASVKVSCKASGYTFTSYYMHWVRQAPGQGLEWMGIINPSVGSTSYAQKFQGRVTMTRDTSTSTVYMELSSLRSEDTAVYYCAREVRVRGVIIPFFDYWDQGTLVTVSSAKTT

SEQ ID NO: 8957 - protein, 127 aa, Homo sapiens; identical to SEQ ID NO: 8956
  REGION 1..127: note = Heavy chain

SEQ ID NO: 8958 - protein, 131 aa, Homo sapiens
  REGION 1..131: note = Heavy chain
QLQLQESGPGLVKPSETLSLTCTVSGGSISSSSYYWGWIRQPPGKGLEWIGSIYYSGSTYYNPSLKSRVTISVDTSKNQFSLKLSSVTAADTAVYYCAGTYYYGSGSYSGYYYYYGMDVWGQGTTVTVSSA

SEQ ID NO: 8959 - protein, 123 aa, Homo sapiens; identical to SEQ ID NO: 8949
  REGION 1..123: note = Heavy chain

SEQ ID NO: 8960 - protein, 122 aa, Homo sapiens
  REGION 1..122: note = Heavy chain
QVQLVESGGGVVQPGRSLRLSCAASGFTFSSYGMHWVRQAPGKGLEWVAVIWYDGSNKYYADSVKGRFTISRDISKNTLYLQMNSLRAEDTSVYYCARGGLLGPFDYWGQGTLVTVSSAKTT

SEQ ID NO: 8961 - protein, 122 aa, Homo sapiens
  REGION 1..122: note = Heavy chain
QVQLVESGGGVVQPGRSLRLSCAASGFTFSSYGMHWVRQAPGKGLEWVAVIWYEGSNKYYADSVKGRFTISRDNSKNTLYLQMNSLRAEDTALYYCARAGLLGYFDYWGQGTLVTVSSAKTT

SEQ ID NO: 8962 - protein, 122 aa, Homo sapiens
  REGION 1..122: note = Heavy chain
QVQLVESGGGVVQPGRSLRLSCAASGFTFSSYGIHWVRQAPGKGLEWVAVIWYDGSNKHYADSVKGRFTISRDNSKNTLYLQMNSLRDEDTAVYYCARGGLIGPFDYWGQGTLVTVSSAKTT

SEQ ID NO: 8963 - protein, 122 aa, Homo sapiens
  REGION 1..122: note = Heavy chain
QVQLVESGGGVVQPGRSLRLSCAASGFTFSSYGMHWVRQAPGKGLEWVAVIWYDGSNKFYADSVKGRFTISSDNSKNTLYLQMNSLRAEDTAVYYCARGGHLGSFDYWGQGTLVTVSSAKTT

SEQ ID NO: 8964 - protein, 122 aa, Homo sapiens
  REGION 1..122: note = Heavy chain
QVQLVESGGGVVQPGRSLRLSCAASGFTFSSYGMHWVRQAPGKGLEWVAVIWYDGSNKYYADSVKGRFTFSRDNSKNTLYLQMNSLRAEDTAVYYCARGGLMGAFDYWGQGTLVTVSSAKTT

SEQ ID NO: 8965 - protein, 123 aa, Homo sapiens; identical to SEQ ID NO: 8947
  REGION 1..123: note = Heavy chain

SEQ ID NO: 8966 - protein, 120 aa, Homo sapiens; identical to SEQ ID NO: 8951
  REGION 1..120: note = Heavy chain

SEQ ID NO: 8967 - protein, 122 aa, Homo sapiens
  REGION 1..122: note = Heavy chain
QVQLVESGGGVVQPGRSLRLSCAASGFTFSSYGMHWVRQAPGKGLEWVAVVWYDGSNKHYADSLKGRLTISRDNSKNTLYLQMNSLRAEDTAVFYCARAGHLGPFDYWGQGTLVTVSSAKTT

SEQ ID NO: 8968 - protein, 123 aa, Homo sapiens; identical to SEQ ID NO: 8870
  REGION 1..123: note = Heavy chain

SEQ ID NO: 8969 - protein, 127 aa, Homo sapiens
  REGION 1..127: note = Heavy chain
QVQLVESGGGVVQPGRSLRLSCAASGFTFSSYGMHWVRQAPGKGLEWVALIWYDGSYTYYADSVKGRFTISRDNSKNTLYLQMNSLRAEDTAVYYCASAYYDILTGPYYFDYWGQGTLVTVSSAKTT

SEQ ID NO: 8970 - protein, 123 aa, Homo sapiens; identical to SEQ ID NO: 8872
  REGION 1..123: note = Heavy chain

SEQ ID NO: 8971 - protein, 122 aa, Homo sapiens; identical to SEQ ID NO: 8910
  REGION 1..122: note = Heavy chain

SEQ ID NO: 8972 - protein, 123 aa, Homo sapiens; identical to SEQ ID NO: 8870
  REGION 1..123: note = Heavy chain

SEQ ID NO: 8973 - protein, 122 aa, Homo sapiens
  REGION 1..122: note = Heavy chain
QLQLQESGPGLVKPSETLSLTCTVSGGSISSSSYYWGWIRQPPGKGLEWIGSIYYRGNTYLNPSLKSRVTISVDTSKNQFSLKLRSVTAADTAVYYCARRSAYDPYYFDYWGQGTLVTVSSA

SEQ ID NO: 8974 - protein, 122 aa, Homo sapiens
  REGION 1..122: note = Heavy chain
QVQLVESGGGVVQPGRSLRLSCAASGFTFSSYGMHWVRQAPGKGLEWVAVIWYDGRNKYYADSVKGRFTISRDNSKNTLYLQMNSLRAEDTAVYYCARGGLTGPFDYWGQGTLVTVSSAKTT

SEQ ID NO: 8975 - protein, 120 aa, Homo sapiens; identical to SEQ ID NO: 8951
  REGION 1..120: note = Heavy chain

SEQ ID NO: 8976 - protein, 122 aa, Homo sapiens; identical to SEQ ID NO: 8946
  REGION 1..122: note = Heavy chain

SEQ ID NO: 8977 - protein, 120 aa, Homo sapiens; identical to SEQ ID NO: 8951
  REGION 1..120: note = Heavy chain

SEQ ID NO: 8978 - protein, 122 aa, Homo sapiens; identical to SEQ ID NO: 8946
  REGION 1..122: note = Heavy chain

SEQ ID NO: 8979 - protein, 123 aa, Homo sapiens; identical to SEQ ID NO: 8949
  REGION 1..123: note = Heavy chain

SEQ ID NO: 8980 - protein, 124 aa, Homo sapiens
  REGION 1..124: note = Heavy chain
QVQLVESGGGVVQPERSLRLSCAASGFTFSSHGMHWVRQAPGKGLEWVAVIWYDGNNKYYADSVKGRFTISRDNSKNTLYLQMNSLRAEDTAVYYCARGGILAAGIFDYWGQGTLVTVSSAKTT

SEQ ID NO: 8981 - protein, 124 aa, Homo sapiens
  REGION 1..124: note = Heavy chain
QVQLVESGGGVVQPGRSLRLSCAASGFTFSSYGMHWVRQAPGKGLEWVAVIWYDGSYKYYADSVKGRFTISRDNSKNTLYLQMNSLRAEDTAVYYCARGSVVAAGLFDYWGQGTLVTVSSAKTT

SEQ ID NO: 8982 - protein, 123 aa, Homo sapiens; identical to SEQ ID NO: 8949
  REGION 1..123: note = Heavy chain

SEQ ID NO: 8983 - protein, 122 aa, Homo sapiens; identical to SEQ ID NO: 8973
  REGION 1..122: note = Heavy chain

SEQ ID NO: 8984 - protein, 120 aa, Homo sapiens
  REGION 1..120: note = Heavy chain
QVQLVQSGAEVKKPGASVKVSCKTSGYTFTSYGITWVRQAPGQGLEWMGWISAYNGNTNYAQKLQGRVTMTTDTSTSTAYMELRSLRSDDTAVYYCAKVSGYFDYWGQGTLVTVSSAKTT

SEQ ID NO: 8985 - protein, 123 aa, Homo sapiens; identical to SEQ ID NO: 8949
  REGION 1..123: note = Heavy chain

SEQ ID NO: 8986 - protein, 123 aa, Homo sapiens; identical to SEQ ID NO: 8947
  REGION 1..123: note = Heavy chain

SEQ ID NO: 8987 - protein, 122 aa, Homo sapiens; identical to SEQ ID NO: 8873
  REGION 1..122: note = Heavy chain

SEQ ID NO: 8988 - protein, 122 aa, Homo sapiens
  REGION 1..122: note = Heavy chain
QVQLVESGGGVVQPGRSLRLSCAASGFTFSRYGMHWVRQAPGKGLEWVAVIWYDGSNKYYADSVKGRFTISRDNSKNTLYLQMNSLRAEDTAVYYCARAGHLGAFDIWGQGTMVTVSSAKTT

SEQ ID NO: 8989 - protein, 123 aa, Homo sapiens; identical to SEQ ID NO: 8947
  REGION 1..123: note = Heavy chain

SEQ ID NO: 8990 - protein, 122 aa, Homo sapiens; identical to SEQ ID NO: 8910
  REGION 1..122: note = Heavy chain

SEQ ID NO: 8991 - protein, 122 aa, Homo sapiens; identical to SEQ ID NO: 8910
  REGION 1..122: note = Heavy chain

SEQ ID NO: 8992 - protein, 6 aa, Homo sapiens
  REGION 1..6: note = Light chain CDR1
QSISSY

SEQ ID NO: 8993 - protein, 6 aa, Homo sapiens
  REGION 1..6: note = Light chain CDR1
QGISNY

SEQ ID NO: 8994 - protein, 6 aa, Homo sapiens
  REGION 1..6: note = Light chain CDR1
QSVSSN

SEQ ID NO: 8995 - protein, 6 aa, Homo sapiens
  REGION 1..6: note = Light chain CDR1
QGIRND

SEQ ID NO: 8996 - protein, 6 aa, Homo sapiens
  REGION 1..6: note = Light chain CDR1
QGIRND

SEQ ID NO: 8997 - protein, 6 aa, Homo sapiens
  REGION 1..6: note = Light chain CDR1
QGIRND

SEQ ID NO: 8998 - protein, 6 aa, Homo sapiens
  REGION 1..6: note = Light chain CDR1
QGISSY

SEQ ID NO: 8999 - protein, 7 aa, Homo sapiens
  REGION 1..7: note = Light chain CDR1
QSVSSSY

SEQ ID NO: 9000 - protein, 6 aa, Homo sapiens
  REGION 1..6: note = Light chain CDR1
QGIRND

SEQ ID NO: 9001 - protein, 6 aa, Homo sapiens
  REGION 1..6: note = Light chain CDR1
QGIRND

SEQ ID NO: 9002 - protein, 6 aa, Homo sapiens
  REGION 1..6: note = Light chain CDR1
QGIRND

SEQ ID NO: 9003 - protein, 6 aa, Homo sapiens
  REGION 1..6: note = Light chain CDR1
QVIRND

SEQ ID NO: 9004 - protein, 7 aa, Homo sapiens
  REGION 1..7: note = Light chain CDR1
QSVSSSY

SEQ ID NO: 9005 - protein, 7 aa, Homo sapiens
  REGION 1..7: note = Light chain CDR1
QSVSSSY

SEQ ID NO: 9006 - protein, 6 aa, Homo sapiens
  REGION 1..6: note = Light chain CDR1
QGISNY

SEQ ID NO: 9007 - protein, 6 aa, Homo sapiens
  REGION 1..6: note = Light chain CDR1
QGIRND

SEQ ID NO: 9008 - protein, 6 aa, Homo sapiens
  REGION 1..6: note = Light chain CDR1
QGIRND

SEQ ID NO: 9009 - protein, 6 aa, Homo sapiens
  REGION 1..6: note = Light chain CDR1
QSISSY

SEQ ID NO: 9010 - protein, 6 aa, Homo sapiens
  REGION 1..6: note = Light chain CDR1
QGISRY

SEQ ID NO: 9011 - protein, 6 aa, Homo sapiens
  REGION 1..6: note = Light chain CDR1
QSISSY

SEQ ID NO: 9012 - protein, 6 aa, Homo sapiens
  REGION 1..6: note = Light chain CDR1
QSISSY

SEQ ID NO: 9013 - protein, 6 aa, Homo sapiens
  REGION 1..6: note = Light chain CDR1
QSISSY

SEQ ID NO: 9014 - protein, 6 aa, Homo sapiens
  REGION 1..6: note = Light chain CDR1
QGISSY

SEQ ID NO: 9015 - protein, 6 aa, Homo sapiens
  REGION 1..6: note = Light chain CDR1
QSISSY

SEQ ID NO: 9016 - protein, 6 aa, Homo sapiens
  REGION 1..6: note = Light chain CDR1
QGISSY

SEQ ID NO: 9017 - protein, 6 aa, Homo sapiens
  REGION 1..6: note = Light chain CDR1
QSISSY

SEQ ID NO: 9018 - protein, 6 aa, Homo sapiens
  REGION 1..6: note = Light chain CDR1
QGIRND

SEQ ID NO: 9019 - protein, 6 aa, Homo sapiens
  REGION 1..6: note = Light chain CDR1
QGIRND

SEQ ID NO: 9020 - protein, 7 aa, Homo sapiens
  REGION 1..7: note = Light chain CDR1
QSVSSSY

SEQ ID NO: 9021 - protein, 6 aa, Homo sapiens
  REGION 1..6: note = Light chain CDR1
QSISSY

SEQ ID NO: 9022 - protein, 6 aa, Homo sapiens
  REGION 1..6: note = Light chain CDR1
QDIRND

SEQ ID NO: 9023 - protein, 7 aa, Homo sapiens
  REGION 1..7: note = Light chain CDR1
QSVSSSY

SEQ ID NO: 9024 - protein, 6 aa, Homo sapiens
  REGION 1..6: note = Light chain CDR1
QSISSY

SEQ ID NO: 9025 - protein, 6 aa, Homo sapiens
  REGION 1..6: note = Light chain CDR1
QSISSY

SEQ ID NO: 9026 - protein, 6 aa, Homo sapiens
  REGION 1..6: note = Light chain CDR1
QGIRND

SEQ ID NO: 9027 - protein, 6 aa, Homo sapiens
  REGION 1..6: note = Light chain CDR1
QGISSY

SEQ ID NO: 9028 - protein, 6 aa, Homo sapiens
  REGION 1..6: note = Light chain CDR1
QSISSY

SEQ ID NO: 9029 - protein, 6 aa, Homo sapiens
  REGION 1..6: note = Light chain CDR1
QSISSY

SEQ ID NO: 9030 - protein, 7 aa, Homo sapiens
  REGION 1..7: note = Light chain CDR1
QSVSSSY

SEQ ID NO: 9031 - protein, 6 aa, Homo sapiens
  REGION 1..6: note = Light chain CDR1
QGIRND

SEQ ID NO: 9032 - protein, 7 aa, Homo sapiens
  REGION 1..7: note = Light chain CDR1
QSVSSSY

SEQ ID NO: 9033 - protein, 6 aa, Homo sapiens
  REGION 1..6: note = Light chain CDR1
QGIRND

SEQ ID NO: 9034 - protein, 6 aa, Homo sapiens
  REGION 1..6: note = Light chain CDR1
QSISSY

SEQ ID NO: 9035 - protein, 7 aa, Homo sapiens
  REGION 1..7: note = Light chain CDR1
QSVSSSY

SEQ ID NO: 9036 - protein, 6 aa, Homo sapiens
  REGION 1..6: note = Light chain CDR1
QGISSY

SEQ ID NO: 9037 - protein, 6 aa, Homo sapiens
  REGION 1..6: note = Light chain CDR1
QGIRND

SEQ ID NO: 9038 - protein, 6 aa, Homo sapiens
  REGION 1..6: note = Light chain CDR1
QSISSY

SEQ ID NO: 9039 - protein, 6 aa, Homo sapiens
  REGION 1..6: note = Light chain CDR1
QSISSY

SEQ ID NO: 9040 - protein, 7 aa, Homo sapiens
  REGION 1..7: note = Light chain CDR1
QSVSSSY

SEQ ID NO: 9041 - protein, 7 aa, Homo sapiens
  REGION 1..7: note = Light chain CDR1
QSVSSSY

SEQ ID NO: 9042 - protein, 6 aa, Homo sapiens
  REGION 1..6: note = Light chain CDR1
QDISNY

SEQ ID NO: 9043 - protein, 7 aa, Homo sapiens
  REGION 1..7: note = Light chain CDR1
QSVSSSY

SEQ ID NO: 9044 - protein, 7 aa, Homo sapiens
  REGION 1..7: note = Light chain CDR1
QSVSSSY

SEQ ID NO: 9045 - protein, 11 aa, Homo sapiens
  REGION 1..11: note = Light chain CDR1
QSLLHSNGYNY

SEQ ID NO: 9046 - protein, 6 aa, Homo sapiens
  REGION 1..6: note = Light chain CDR1
QSISSY

SEQ ID NO: 9047 - protein, 7 aa, Homo sapiens
  REGION 1..7: note = Light chain CDR1
QSVSSSY

SEQ ID NO: 9048 - protein, 7 aa, Homo sapiens
  REGION 1..7: note = Light chain CDR1
QSVSSSY

SEQ ID NO: 9049 - protein, 7 aa, Homo sapiens
  REGION 1..7: note = Light chain CDR1
QSISSSY

SEQ ID NO: 9050 - protein, 6 aa, Homo sapiens
  REGION 1..6: note = Light chain CDR1
QSISSY

SEQ ID NO: 9051 - protein, 7 aa, Homo sapiens
  REGION 1..7: note = Light chain CDR1
QSVSSSS

SEQ ID NO: 9052 - protein, 6 aa, Homo sapiens
  REGION 1..6: note = Light chain CDR1
QSISSY

SEQ ID NO: 9053 - protein, 7 aa, Homo sapiens
  REGION 1..7: note = Light chain CDR1
QSVSSSY

SEQ ID NO: 9054 - protein, 7 aa, Homo sapiens
  REGION 1..7: note = Light chain CDR1
QSVSSSY

SEQ ID NO: 9055 - protein, 7 aa, Homo sapiens
  REGION 1..7: note = Light chain CDR1
QSVSSSY

SEQ ID NO: 9056 - protein, 7 aa, Homo sapiens
  REGION 1..7: note = Light chain CDR1
QSVSSSY

SEQ ID NO: 9057 - protein, 11 aa, Homo sapiens
  REGION 1..11: note = Light chain CDR1
QSLLHSNGYNY

SEQ ID NO: 9058 - protein, 7 aa, Homo sapiens
  REGION 1..7: note = Light chain CDR1
QSVSSSY

SEQ ID NO: 9059 - protein, 6 aa, Homo sapiens
  REGION 1..6: note = Light chain CDR1
QSISSY

SEQ ID NO: 9060 - protein, 6 aa, Homo sapiens
  REGION 1..6: note = Light chain CDR1
QSISSY

SEQ ID NO: 9061 - protein, 6 aa, Homo sapiens
  REGION 1..6: note = Light chain CDR1
QSISSF

SEQ ID NO: 9062 - protein, 7 aa, Homo sapiens
  REGION 1..7: note = Light chain CDR1
QSVSSSY

SEQ ID NO: 9063 - protein, 6 aa, Homo sapiens
  REGION 1..6: note = Light chain CDR1
QSISSF

SEQ ID NO: 9064 - protein, 6 aa, Homo sapiens
  REGION 1..6: note = Light chain CDR1
QSISSY

SEQ ID NO: 9065 - protein, 7 aa, Homo sapiens
  REGION 1..7: note = Light chain CDR1
QSVSSSY

SEQ ID NO: 9066 - protein, 6 aa, Homo sapiens
  REGION 1..6: note = Light chain CDR1
QSISSY

SEQ ID NO: 9067 - protein, 7 aa, Homo sapiens
  REGION 1..7: note = Light chain CDR1
QSVSSSY

SEQ ID NO: 9068 - protein, 6 aa, Homo sapiens
  REGION 1..6: note = Light chain CDR1
QSISSY

SEQ ID NO: 9069 - protein, 7 aa, Homo sapiens
  REGION 1..7: note = Light chain CDR1
QSVSSSY

SEQ ID NO: 9070 - protein, 7 aa, Homo sapiens
  REGION 1..7: note = Light chain CDR1
QSVSSSY

SEQ ID NO: 9071 - protein, 6 aa, Homo sapiens
  REGION 1..6: note = Light chain CDR1
QSISSY

SEQ ID NO: 9072 - protein, 6 aa, Homo sapiens
  REGION 1..6: note = Light chain CDR1
QSISSY

SEQ ID NO: 9073 - protein, 7 aa, Homo sapiens
  REGION 1..7: note = Light chain CDR1
QSVSSSY

SEQ ID NO: 9074 - protein, 6 aa, Homo sapiens
  REGION 1..6: note = Light chain CDR1
QGISSY

SEQ ID NO: 9075 - protein, 11 aa, Homo sapiens
  REGION 1..11: note = Light chain CDR1
QSLLHSNGYNY

SEQ ID NO: 9076 - protein, 7 aa, Homo sapiens
  REGION 1..7: note = Light chain CDR1
QSVSSSY

SEQ ID NO: 9077 - protein, 7 aa, Homo sapiens
  REGION 1..7: note = Light chain CDR1
QSVSSSY

SEQ ID NO: 9078 - protein, 7 aa, Homo sapiens
  REGION 1..7: note = Light chain CDR1
QRAGSSY

SEQ ID NO: 9079 - protein, 6 aa, Homo sapiens
  REGION 1..6: note = Light chain CDR1
QGIRND

SEQ ID NO: 9080 - protein, 6 aa, Homo sapiens
  REGION 1..6: note = Light chain CDR1
QGIRND

SEQ ID NO: 9081 - protein, 11 aa, Homo sapiens
  REGION 1..11: note = Light chain CDR1
QSLLHSNGYNY

SEQ ID NO: 9082 - protein, 7 aa, Homo sapiens
  REGION 1..7: note = Light chain CDR1
QSVSSSY

SEQ ID NO: 9083 - protein, 6 aa, Homo sapiens
  REGION 1..6: note = Light chain CDR1
QGIRND

SEQ ID NO: 9084 - protein, 6 aa, Homo sapiens
  REGION 1..6: note = Light chain CDR1
QGIRND

SEQ ID NO: 9085 - protein, 7 aa, Homo sapiens
  REGION 1..7: note = Light chain CDR1
QRAGSSY

SEQ ID NO: 9086 - protein, 6 aa, Homo sapiens
  REGION 1..6: note = Light chain CDR1
QGIRND

SEQ ID NO: 9087 - protein, 6 aa, Homo sapiens
  REGION 1..6: note = Light chain CDR1
QGIRND

SEQ ID NO: 9088 - protein, 6 aa, Homo sapiens
  REGION 1..6: note = Light chain CDR1
QGISSY

SEQ ID NO: 9089 - protein, 6 aa, Homo sapiens
  REGION 1..6: note = Light chain CDR1
QSISSY

SEQ ID NO: 9090 - protein, 6 aa, Homo sapiens
  REGION 1..6: note = Light chain CDR1
QGIRND

SEQ ID NO: 9091 - protein, 11 aa, Homo sapiens
  REGION 1..11: note = Light chain CDR1
QSLLHSNGYNY

SEQ ID NO: 9092 - protein, 6 aa, Homo sapiens
  REGION 1..6: note = Light chain CDR1
QGIRND

SEQ ID NO: 9093 - protein, 6 aa, Homo sapiens
  REGION 1..6: note = Light chain CDR1
QGIRND

SEQ ID NO: 9094 - protein, 6 aa, Homo sapiens
  REGION 1..6: note = Light chain CDR1
QGIRND

SEQ ID NO: 9095 - protein, 7 aa, Homo sapiens
  REGION 1..7: note = Light chain CDR1
QSVSSSY

SEQ ID NO: 9096 - protein, 6 aa, Homo sapiens
  REGION 1..6: note = Light chain CDR1
QGIRND

SEQ ID NO: 9097 - protein, 6 aa, Homo sapiens
  REGION 1..6: note = Light chain CDR1
QGISSY

SEQ ID NO: 9098 - protein, 6 aa, Homo sapiens
  REGION 1..6: note = Light chain CDR1
QGIRND

SEQ ID NO: 9099 - protein, 6 aa, Homo sapiens
  REGION 1..6: note = Light chain CDR1
QGIRSY

SEQ ID NO: 9100 - protein, 6 aa, Homo sapiens
  REGION 1..6: note = Light chain CDR1
QGIRND

SEQ ID NO: 9101 - protein, 6 aa, Homo sapiens
  REGION 1..6: note = Light chain CDR1
QGIRND

SEQ ID NO: 9102 - protein, 6 aa, Homo sapiens
  REGION 1..6: note = Light chain CDR1
QSISSY

SEQ ID NO: 9103 - protein, 7 aa, Homo sapiens
  REGION 1..7: note = Light chain CDR1
QSVSSSY

SEQ ID NO: 9104 - protein, 6 aa, Homo sapiens
  REGION 1..6: note = Light chain CDR1
QSISSY

SEQ ID NO: 9105 - protein, 6 aa, Homo sapiens
  REGION 1..6: note = Light chain CDR1
QSISSY

SEQ ID NO: 9106 - protein, 6 aa, Homo sapiens
  REGION 1..6: note = Light chain CDR1
QSISSY

SEQ ID NO: 9107 - protein, 6 aa, Homo sapiens
  REGION 1..6: note = Light chain CDR1
QGIRND

SEQ ID NO: 9108 - protein, 6 aa, Homo sapiens
  REGION 1..6: note = Light chain CDR1
QGIRND

SEQ ID NO: 9109 - protein, 6 aa, Homo sapiens
  REGION 1..6: note = Light chain CDR1
QGIRND

SEQ ID NO: 9110 - protein, 6 aa, Homo sapiens
  REGION 1..6: note = Light chain CDR1
QSISSY

SEQ ID NO: 9111 - protein, 7 aa, Homo sapiens
  REGION 1..7: note = Light chain CDR1
QRAGSSY

SEQ ID NO: 9112 - protein, 6 aa, Homo sapiens
  REGION 1..6: note = Light chain CDR1
QGIRND

SEQ ID NO: 9113 - protein, 7 aa, Homo sapiens
  REGION 1..7: note = Light chain CDR1
QSVSSSY

SEQ ID NO: 9114 - protein, 6 aa, Homo sapiens
  REGION 1..6: note = Light chain CDR1
QGIRND

SEQ ID NO: 9115 - protein, 6 aa, Homo sapiens
  REGION 1..6: note = Light chain CDR1
QGISSY

SEQ ID NO: 9116 - protein, 6 aa, Homo sapiens
  REGION 1..6: note = Light chain CDR1
QGIRND

SEQ ID NO: 9117 - protein, 6 aa, Homo sapiens
  REGION 1..6: note = Light chain CDR1
QGIRND

SEQ ID NO: 9118 - protein, 6 aa, Homo sapiens
  REGION 1..6: note = Light chain CDR1
QGISSY

SEQ ID NO: 9119 - protein, 7 aa, Homo sapiens
  REGION 1..7: note = Light chain CDR1
QSVSSSY

SEQ ID NO: 9120 - protein, 6 aa, Homo sapiens
  REGION 1..6: note = Light chain CDR1
QGISSY

SEQ ID NO: 9121 - protein, 11 aa, Homo sapiens
  REGION 1..11: note = Light chain CDR1
QSLLHSNGYNY

SEQ ID NO: 9122 - protein, 6 aa, Homo sapiens
  REGION 1..6: note = Light chain CDR1
QGIRND

SEQ ID NO: 9123 - protein, 7 aa, Homo sapiens
  REGION 1..7: note = Light chain CDR1
QSVSSSY

SEQ ID NO: 9124 - protein, 6 aa, Homo sapiens
  REGION 1..6: note = Light chain CDR1
QGISND

SEQ ID NO: 9125 - protein, 6 aa, Homo sapiens
  REGION 1..6: note = Light chain CDR1
QDITND

SEQ ID NO: 9126 - protein, 7 aa, Homo sapiens
  REGION 1..7: note = Light chain CDR1
QSVSSNY

SEQ ID NO: 9127 - protein, 6 aa, Homo sapiens
  REGION 1..6: note = Light chain CDR1
QDITND

SEQ ID NO: 9128 - protein, 7 aa, Homo sapiens
  REGION 1..7: note = Light chain CDR1
QSVSSNY

SEQ ID NO: 9129 - protein, 7 aa, Homo sapiens
  REGION 1..7: note = Light chain CDR1
QSVSSSY

SEQ ID NO: 9130 - protein, 7 aa, Homo sapiens
  REGION 1..7: note = Light chain CDR1
QSVSSSY

SEQ ID NO: 9131 - protein, 7 aa, Homo sapiens
  REGION 1..7: note = Light chain CDR1
QSVSSSY

SEQ ID NO: 9132 - protein, 6 aa, Homo sapiens
  REGION 1..6: note = Light chain CDR1
QDISRL

SEQ ID NO: 9133 - protein, 6 aa, Homo sapiens
  REGION 1..6: note = Light chain CDR1
QGINNY

SEQ ID NO: 9134 - protein, 7 aa, Homo sapiens
  REGION 1..7: note = Light chain CDR1
QSVSSNY

SEQ ID NO: 9135 - protein, 6 aa, Homo sapiens
  REGION 1..6: note = Light chain CDR1
QDISSF

SEQ ID NO: 9136 - protein, 7 aa, Homo sapiens
  REGION 1..7: note = Light chain CDR1
QSVSSSY

SEQ ID NO: 9137 - protein, 7 aa, Homo sapiens
  REGION 1..7: note = Light chain CDR1
QSVSSNY

SEQ ID NO: 9138 - protein, 7 aa, Homo sapiens
  REGION 1..7: note = Light chain CDR1
QSVSSNY

SEQ ID NO: 9139 - protein, 7 aa, Homo sapiens
  REGION 1..7: note = Light chain CDR1
QSVSSSY

SEQ ID NO: 9140 - protein, 6 aa, Homo sapiens
  REGION 1..6: note = Light chain CDR1
QSIGSS

SEQ ID NO: 9141 - protein, 5 aa, Homo sapiens
  REGION 1..5: note = Light chain CDR1
QSTNY

SEQ ID NO: 9142 - protein, 6 aa, Homo sapiens
  REGION 1..6: note = Light chain CDR1
QSIGSS

SEQ ID NO: 9143 - protein, 7 aa, Homo sapiens
  REGION 1..7: note = Light chain CDR1
QSVSSSY

SEQ ID NO: 9144 - protein, 7 aa, Homo sapiens
  REGION 1..7: note = Light chain CDR1
QSISSSY

SEQ ID NO: 9145 - protein, 6 aa, Homo sapiens
  REGION 1..6: note = Light chain CDR1
QDITND

SEQ ID NO: 9146 - protein, 6 aa, Homo sapiens
  REGION 1..6: note = Light chain CDR1
QDITND

SEQ ID NO: 9147 - protein, 6 aa, Homo sapiens
  REGION 1..6: note = Light chain CDR1
QDISND

SEQ ID NO: 9148 - protein, 6 aa, Homo sapiens
  REGION 1..6: note = Light chain CDR1
QGINNY

SEQ ID NO: 9149 - protein, 7 aa, Homo sapiens
  REGION 1..7: note = Light chain CDR1
QSVSSSY

SEQ ID NO: 9150 - protein, 6 aa, Homo sapiens
  REGION 1..6: note = Light chain CDR1
QGISSF

SEQ ID NO: 9151 - protein, 6 aa, Homo sapiens
  REGION 1..6: note = Light chain CDR1
QDITND

SEQ ID NO: 9152 - protein, 6 aa, Homo sapiens
  REGION 1..6: note = Light chain CDR1
QGISSY

SEQ ID NO: 9153 - protein, 7 aa, Homo sapiens
  REGION 1..7: note = Light chain CDR1
QSVSSSY

SEQ ID NO: 9154 - protein, 6 aa, Homo sapiens
  REGION 1..6: note = Light chain CDR1
QGINNY

SEQ ID NO: 9155 - protein, 7 aa, Homo sapiens
  REGION 1..7: note = Light chain CDR1
QSISSSY

SEQ ID NO: 9156 - protein, 7 aa, Homo sapiens
  REGION 1..7: note = Light chain CDR1
QSVSSSY

SEQ ID NO: 9157 - protein, 7 aa, Homo sapiens
  REGION 1..7: note = Light chain CDR1
QSVSSSY

SEQ ID NO: 9158 - protein, 7 aa, Homo sapiens
  REGION 1..7: note = Light chain CDR1
QSVSSNY

SEQ ID NO: 9159 - protein, 7 aa, Homo sapiens
  REGION 1..7: note = Light chain CDR1
QSVSSSY

SEQ ID NO: 9160 - protein, 6 aa, Homo sapiens
  REGION 1..6: note = Light chain CDR1
QDITND

SEQ ID NO: 9161 - protein, 7 aa, Homo sapiens
  REGION 1..7: note = Light chain CDR1
QSVSSSY

SEQ ID NO: 9162 - protein, 6 aa, Homo sapiens
  REGION 1..6: note = Light chain CDR1
QGIGND

SEQ ID NO: 9163 - protein, 7 aa, Homo sapiens
  REGION 1..7: note = Light chain CDR1
QSVSSSY

SEQ ID NO: 9164 - protein, 7 aa, Homo sapiens
  REGION 1..7: note = Light chain CDR1
QSISSSY

SEQ ID NO: 9165 - protein, 7 aa, Homo sapiens
  REGION 1..7: note = Light chain CDR1
QSVSSNY

SEQ ID NO: 9166 - protein, 7 aa, Homo sapiens
  REGION 1..7: note = Light chain CDR1
QSVSSSY

SEQ ID NO: 9167 - protein, 7 aa, Homo sapiens
  REGION 1..7: note = Light chain CDR1
QSVSSSY

SEQ ID NO: 9168 - protein, 6 aa, Homo sapiens
  REGION 1..6: note = Light chain CDR1
QGISND

SEQ ID NO: 9169 - protein, 7 aa, Homo sapiens
  REGION 1..7: note = Light chain CDR1
QSVSSNY

SEQ ID NO: 9170 - protein, 7 aa, Homo sapiens
  REGION 1..7: note = Light chain CDR1
PSISSSY

SEQ ID NO: 9171 - protein, 7 aa, Homo sapiens
  REGION 1..7: note = Light chain CDR1
QSVSSSY

SEQ ID NO: 9172 - protein, 6 aa, Homo sapiens
  REGION 1..6: note = Light chain CDR1
QDITND

SEQ ID NO: 9173 - protein, 6 aa, Homo sapiens
  REGION 1..6: note = Light chain CDR1
QGISND

SEQ ID NO: 9174 - protein, 7 aa, Homo sapiens
  REGION 1..7: note = Light chain CDR1
QSVSSSY

SEQ ID NO: 9175 - protein, 6 aa, Homo sapiens
  REGION 1..6: note = Light chain CDR1
QNIGSS

SEQ ID NO: 9176 - protein, 6 aa, Homo sapiens
  REGION 1..6: note = Light chain CDR1
QDISND

SEQ ID NO: 9177 - protein, 6 aa, Homo sapiens
  REGION 1..6: note = Light chain CDR1
QDISRL

SEQ ID NO: 9178 - protein, 6 aa, Homo sapiens
  REGION 1..6: note = Light chain CDR1
QDISRL

SEQ ID NO: 9179 - protein, 7 aa, Homo sapiens
  REGION 1..7: note = Light chain CDR1
QSVSSSY

SEQ ID NO: 9180 - protein, 7 aa, Homo sapiens
  REGION 1..7: note = Light chain CDR1
QSVSSSY

SEQ ID NO: 9181 - protein, 7 aa, Homo sapiens
  REGION 1..7: note = Light chain CDR1
QSVSSNF

SEQ ID NO: 9182 - protein, 6 aa, Homo sapiens
  REGION 1..6: note = Light chain CDR1
QGISND

SEQ ID NO: 9183 - protein, 6 aa, Homo sapiens
  REGION 1..6: note = Light chain CDR1
QDISSF

SEQ ID NO: 9184 - protein, 6 aa, Homo sapiens
  REGION 1..6: note = Light chain CDR1
QDITND

SEQ ID NO: 9185 - protein, 7 aa, Homo sapiens
  REGION 1..7: note = Light chain CDR1
QSVSSSY

SEQ ID NO: 9186 - protein, 6 aa, Homo sapiens
  REGION 1..6: note = Light chain CDR1
QDISRL

SEQ ID NO: 9187 - protein, 6 aa, Homo sapiens
  REGION 1..6: note = Light chain CDR1
QGISSF

SEQ ID NO: 9188 - protein, 7 aa, Homo sapiens
  REGION 1..7: note = Light chain CDR1
QSVSSSY

SEQ ID NO: 9189 - protein, 7 aa, Homo sapiens
  REGION 1..7: note = Light chain CDR1
QSVSSSY

SEQ ID NO: 9190 - protein, 6 aa, Homo sapiens
  REGION 1..6: note = Light chain CDR1
QDITND

SEQ ID NO: 9191 - protein, 6 aa, Homo sapiens
  REGION 1..6: note = Light chain CDR1
QGISND

SEQ ID NO: 9192 - protein, 7 aa, Homo sapiens
  REGION 1..7: note = Light chain CDR1
QSVSSSY

SEQ ID NO: 9193 - protein, 7 aa, Homo sapiens
  REGION 1..7: note = Light chain CDR1
QSVSSSY

SEQ ID NO: 9194 - protein, 6 aa, Homo sapiens
  REGION 1..6: note = Light chain CDR1
QGINND

SEQ ID NO: 9195 - protein, 7 aa, Homo sapiens
  REGION 1..7: note = Light chain CDR1
QSVSSSY

SEQ ID NO: 9196 - protein, 6 aa, Homo sapiens
  REGION 1..6: note = Light chain CDR1
QDISRL

SEQ ID NO: 9197 - protein, 7 aa, Homo sapiens
  REGION 1..7: note = Light chain CDR1
QSVSSSY

SEQ ID NO: 9198 - protein, 7 aa, Homo sapiens
  REGION 1..7: note = Light chain CDR1
QSVSSSY

SEQ ID NO: 9199 - protein, 7 aa, Homo sapiens
  REGION 1..7: note = Light chain CDR1
QSVSSNY

SEQ ID NO: 9200 - protein, 7 aa, Homo sapiens
  REGION 1..7: note = Light chain CDR1
QSVSSSY

SEQ ID NO: 9201 - protein, 6 aa, Homo sapiens
  REGION 1..6: note = Light chain CDR1
QDITND

SEQ ID NO: 9202 - protein, 7 aa, Homo sapiens
  REGION 1..7: note = Light chain CDR1
QSVSSSY

SEQ ID NO: 9203 - protein, 7 aa, Homo sapiens
  REGION 1..7: note = Light chain CDR1
QSVSSSY

SEQ ID NO: 9204 - protein, 7 aa, Homo sapiens
  REGION 1..7: note = Light chain CDR1
QSVSSNF

SEQ ID NO: 9205 - protein, 6 aa, Homo sapiens
  REGION 1..6: note = Light chain CDR1
QGISND

SEQ ID NO: 9206 - protein, 6 aa, Homo sapiens
  REGION 1..6: note = Light chain CDR1
QGISND

SEQ ID NO: 9207 - protein, 6 aa, Homo sapiens
  REGION 1..6: note = Light chain CDR1
QDISRL

SEQ ID NO: 9208 - protein, 7 aa, Homo sapiens
  REGION 1..7: note = Light chain CDR1
QSVSGSY

SEQ ID NO: 9209 - protein, 6 aa, Homo sapiens
  REGION 1..6: note = Light chain CDR1
QGISSY

SEQ ID NO: 9210 - protein, 7 aa, Homo sapiens
  REGION 1..7: note = Light chain CDR1
QSVSSSY

SEQ ID NO: 9211 - protein, 7 aa, Homo sapiens
  REGION 1..7: note = Light chain CDR1
QSVSSSY

SEQ ID NO: 9212 - protein, 7 aa, Homo sapiens
  REGION 1..7: note = Light chain CDR1
QSVSSSY

SEQ ID NO: 9213 - protein, 6 aa, Homo sapiens
  REGION 1..6: note = Light chain CDR1
QGISND

SEQ ID NO: 9214 - protein, 6 aa, Homo sapiens
  REGION 1..6: note = Light chain CDR1
QGISND

SEQ ID NO: 9215 - protein, 6 aa, Homo sapiens
  REGION 1..6: note = Light chain CDR1
QGISND

SEQ ID NO: 9216 - protein, 6 aa, Homo sapiens
  REGION 1..6: note = Light chain CDR1
QGISND

SEQ ID NO: 9217 - protein, 7 aa, Homo sapiens
  REGION 1..7: note = Light chain CDR1
QSVSSSY

SEQ ID NO: 9218 - protein, 6 aa, Homo sapiens
  REGION 1..6: note = Light chain CDR1
QGISND

SEQ ID NO: 9219 - protein, 6 aa, Homo sapiens
  REGION 1..6: note = Light chain CDR1
QGISND

SEQ ID NO: 9220 - protein, 6 aa, Homo sapiens
  REGION 1..6: note = Light chain CDR1
QGISND

SEQ ID NO: 9221 - protein, 6 aa, Homo sapiens
  REGION 1..6: note = Light chain CDR1
QGISND

SEQ ID NO: 9222 - protein, 6 aa, Homo sapiens
  REGION 1..6: note = Light chain CDR1
QDISND

SEQ ID NO: 9223 - protein, 6 aa, Homo sapiens
  REGION 1..6: note = Light chain CDR1
QGISSY

SEQ ID NO: 9224 - protein, 6 aa, Homo sapiens
  REGION 1..6: note = Light chain CDR1
QGISND

SEQ ID NO: 9225 - protein, 7 aa, Homo sapiens
  REGION 1..7: note = Light chain CDR1
QSVSSSY

SEQ ID NO: 9226 - protein, 6 aa, Homo sapiens
  REGION 1..6: note = Light chain CDR1
QGISND

SEQ ID NO: 9227 - protein, 7 aa, Homo sapiens
  REGION 1..7: note = Light chain CDR1
QSVSSSY

SEQ ID NO: 9228 - protein, 7 aa, Homo sapiens
  REGION 1..7: note = Light chain CDR1
QSVSSSY

SEQ ID NO: 9229 - protein, 6 aa, Homo sapiens
  REGION 1..6: note = Light chain CDR1
QGISND

SEQ ID NO: 9230 - protein, 7 aa, Homo sapiens
  REGION 1..7: note = Light chain CDR1
QSVSSSY

SEQ ID NO: 9231 - protein, 7 aa, Homo sapiens
  REGION 1..7: note = Light chain CDR1
QSVSSSY

SEQ ID NO: 9232 - protein, 7 aa, Homo sapiens
  REGION 1..7: note = Light chain CDR1
QSVSSSY

SEQ ID NO: 9233 - protein, 7 aa, Homo sapiens
  REGION 1..7: note = Light chain CDR1
QSGSSSY

SEQ ID NO: 9234 - protein, 7 aa, Homo sapiens
  REGION 1..7: note = Light chain CDR1
QSVSSSY

SEQ ID NO: 9235 - protein, 7 aa, Homo sapiens
  REGION 1..7: note = Light chain CDR1
QSGSSSY

SEQ ID NO: 9236 - protein, 7 aa, Homo sapiens
  REGION 1..7: note = Light chain CDR1
QSVSSSY

SEQ ID NO: 9237 - protein, 11 aa, Homo sapiens
  REGION 1..11: note = Light chain CDR1
QSLLHSNGYNY

SEQ ID NO: 9238 - protein, 7 aa, Homo sapiens
  REGION 1..7: note = Light chain CDR1
QSDSSSY

SEQ ID NO: 9239 - protein, 6 aa, Homo sapiens
  REGION 1..6: note = Light chain CDR1
QSISSY

SEQ ID NO: 9240 - protein, 11 aa, Homo sapiens
  REGION 1..11: note = Light chain CDR1
QSLLHSNGYNY

SEQ ID NO: 9241 - protein, 6 aa, Homo sapiens
  REGION 1..6: note = Light chain CDR1
QSIGSS

SEQ ID NO: 9242 - protein, 7 aa, Homo sapiens
  REGION 1..7: note = Light chain CDR1
QSVSSSY

SEQ ID NO: 9243 - protein, 6 aa, Homo sapiens
  REGION 1..6: note = Light chain CDR1
QGISNY

SEQ ID NO: 9244 - protein, 7 aa, Homo sapiens
  REGION 1..7: note = Light chain CDR1
QSVSSSY

SEQ ID NO: 9245 - protein, 7 aa, Homo sapiens
  REGION 1..7: note = Light chain CDR1
QSVSSTY

SEQ ID NO: 9246 - protein, 7 aa, Homo sapiens
  REGION 1..7: note = Light chain CDR1
QSVSSSY

SEQ ID NO: 9247 - protein, 7 aa, Homo sapiens
  REGION 1..7: note = Light chain CDR1
QSGSSSY

SEQ ID NO: 9248 - protein, 7 aa, Homo sapiens
  REGION 1..7: note = Light chain CDR1
QSVSSSY

SEQ ID NO: 9249 - protein, 7 aa, Homo sapiens
  REGION 1..7: note = Light chain CDR1
QSGSSSY

SEQ ID NO: 9250 - protein, 7 aa, Homo sapiens
  REGION 1..7: note = Light chain CDR1
QSVSSSY

SEQ ID NO: 9251 - protein, 7 aa, Homo sapiens
  REGION 1..7: note = Light chain CDR1
QSVSSSY

SEQ ID NO: 9252 - protein, 7 aa, Homo sapiens
  REGION 1..7: note = Light chain CDR1
QSVSSSY

SEQ ID NO: 9253 - protein, 7 aa, Homo sapiens
  REGION 1..7: note = Light chain CDR1
QSVSSSY

SEQ ID NO: 9254 - protein, 7 aa, Homo sapiens
  REGION 1..7: note = Light chain CDR1
QSGSSSY

SEQ ID NO: 9255 - protein, 7 aa, Homo sapiens
  REGION 1..7: note = Light chain CDR1
QSVSSSY

SEQ ID NO: 9256 - protein, 7 aa, Homo sapiens
  REGION 1..7: note = Light chain CDR1
QSVSSSY

SEQ ID NO: 9257 - protein, 7 aa, Homo sapiens
  REGION 1..7: note = Light chain CDR1
QSGSSSY

SEQ ID NO: 9258 - protein, 7 aa, Homo sapiens
  REGION 1..7: note = Light chain CDR1
QSVSSSY

SEQ ID NO: 9259 - protein, 7 aa, Homo sapiens
  REGION 1..7: note = Light chain CDR1
QSVSSSY

SEQ ID NO: 9260 - protein, 7 aa, Homo sapiens
  REGION 1..7: note = Light chain CDR1
QSVSSSY

SEQ ID NO: 9261 - protein, 7 aa, Homo sapiens
  REGION 1..7: note = Light chain CDR1
QSGSSSY

SEQ ID NO: 9262 - protein, 7 aa, Homo sapiens
  REGION 1..7: note = Light chain CDR1
QSVSSTY

SEQ ID NO: 9263 - protein, 7 aa, Homo sapiens
  REGION 1..7: note = Light chain CDR1
QSGSSSY

SEQ ID NO: 9264 - protein, 11 aa, Homo sapiens
  REGION 1..11: note = Light chain CDR1
QSLLHSNGYNY

SEQ ID NO: 9265 - protein, 7 aa, Homo sapiens
  REGION 1..7: note = Light chain CDR1
QSVSSSY

SEQ ID NO: 9266 - protein, 7 aa, Homo sapiens
  REGION 1..7: note = Light chain CDR1
QSVSSSY

SEQ ID NO: 9267 - protein, 7 aa, Homo sapiens
  REGION 1..7: note = Light chain CDR1
QSVSSSY

SEQ ID NO: 9268 - protein, 7 aa, Homo sapiens
  REGION 1..7: note = Light chain CDR1
QSVSSSY

SEQ ID NO: 9269 - protein, 7 aa, Homo sapiens
  REGION 1..7: note = Light chain CDR1
QSVSSSY

SEQ ID NO: 9270 - protein, 7 aa, Homo sapiens
  REGION 1..7: note = Light chain CDR1
QTISSSY

SEQ ID NO: 9271 - protein, 7 aa, Homo sapiens
  REGION 1..7: note = Light chain CDR1
QSVSSSY

SEQ ID NO: 9272 - protein, 7 aa, Homo sapiens
  REGION 1..7: note = Light chain CDR1
QSVSSSY

SEQ ID NO: 9273 - protein, 5 aa, Homo sapiens
  REGION 1..5: note = Light chain CDR1
QSVSY

SEQ ID NO: 9274 - protein, 7 aa, Homo sapiens
  REGION 1..7: note = Light chain CDR1
QSVSSSY

SEQ ID NO: 9275 - protein, 5 aa, Homo sapiens
  REGION 1..5: note = Light chain CDR1
QSVSY

SEQ ID NO: 9276 - protein, 7 aa, Homo sapiens
  REGION 1..7: note = Light chain CDR1
QSVSSSY

SEQ ID NO: 9277 - protein, 7 aa, Homo sapiens
  REGION 1..7: note = Light chain CDR1
QSVSSSY

SEQ ID NO: 9278 - protein, 7 aa, Homo sapiens
  REGION 1..7: note = Light chain CDR1
QSVSSSY

SEQ ID NO: 9279 - protein, 7 aa, Homo sapiens
  REGION 1..7: note = Light chain CDR1
QTISSSY

SEQ ID NO: 9280 - protein, 7 aa, Homo sapiens
  REGION 1..7: note = Light chain CDR1
QSVSSSY

SEQ ID NO: 9281 - protein, 7 aa, Homo sapiens
  REGION 1..7: note = Light chain CDR1
QSVSSSY

SEQ ID NO: 9282 - protein, 7 aa, Homo sapiens
  REGION 1..7: note = Light chain CDR1
QSVSSSY

SEQ ID NO: 9283 - protein, 7 aa, Homo sapiens
  REGION 1..7: note = Light chain CDR1
QSVSSSY

SEQ ID NO: 9284 - protein, 7 aa, Homo sapiens
  REGION 1..7: note = Light chain CDR1
QSVSSSY

SEQ ID NO: 9285 - protein, 7 aa, Homo sapiens
  REGION 1..7: note = Light chain CDR1
QSVSSSY

SEQ ID NO: 9286 - protein, 7 aa, Homo sapiens
  REGION 1..7: note = Light chain CDR1
QSVSSSY

SEQ ID NO: 9287 - protein, 7 aa, Homo sapiens
  REGION 1..7: note = Light chain CDR1
QSVSSSY

SEQ ID NO: 9288 - protein, 7 aa, Homo sapiens
  REGION 1..7: note = Light chain CDR1
QSVSSSY

SEQ ID NO: 9289 - protein, 7 aa, Homo sapiens
  REGION 1..7: note = Light chain CDR1
QSVSSSY

SEQ ID NO: 9290 - protein, 7 aa, Homo sapiens
  REGION 1..7: note = Light chain CDR1
QSVSSSY

SEQ ID NO: 9291 - protein, 7 aa, Homo sapiens
  REGION 1..7: note = Light chain CDR1
QSVSSSY

SEQ ID NO: 9292 - protein, 7 aa, Homo sapiens
  REGION 1..7: note = Light chain CDR1
QSVSSSY

SEQ ID NO: 9293 - protein, 7 aa, Homo sapiens
  REGION 1..7: note = Light chain CDR1
QSVSSSY

SEQ ID NO: 9294 - protein, 7 aa, Homo sapiens
  REGION 1..7: note = Light chain CDR1
QSVSSTY

SEQ ID NO: 9295 - protein, 7 aa, Homo sapiens
  REGION 1..7: note = Light chain CDR1
QSVSSSY

SEQ ID NO: 9296 - protein, 6 aa, Homo sapiens
  REGION 1..6: note = Light chain CDR1
QSISSY

SEQ ID NO: 9297 - protein, 7 aa, Homo sapiens
  REGION 1..7: note = Light chain CDR1
QSVSSSY

SEQ ID NO: 9298 - protein, 6 aa, Homo sapiens
  REGION 1..6: note = Light chain CDR1
QGISNY

SEQ ID NO: 9299 - protein, 7 aa, Homo sapiens
  REGION 1..7: note = Light chain CDR1
QSVSSSY

SEQ ID NO: 9300 - protein, 7 aa, Homo sapiens
  REGION 1..7: note = Light chain CDR1
QSGSSSY

SEQ ID NO: 9301 - protein, 7 aa, Homo sapiens
  REGION 1..7: note = Light chain CDR1
QSVSSSY

SEQ ID NO: 9302 - protein, 7 aa, Homo sapiens
  REGION 1..7: note = Light chain CDR1
QSVSSSY

SEQ ID NO: 9303 - protein, 7 aa, Homo sapiens
  REGION 1..7: note = Light chain CDR1
QSVSSSY

SEQ ID NO: 9304 - protein, 6 aa, Homo sapiens
  REGION 1..6: note = Light chain CDR1
QSISSY

SEQ ID NO: 9305 - protein, 7 aa, Homo sapiens
  REGION 1..7: note = Light chain CDR1
QTISSSY

SEQ ID NO: 9306 - protein, 5 aa, Homo sapiens
  REGION 1..5: note = Light chain CDR1
QSVSY

SEQ ID NO: 9307 - protein, 12 aa, Homo sapiens
  REGION 1..12: note = Light chain CDR1
QSVLYRSNNKNY

SEQ ID NO: 9308 - protein, 7 aa, Homo sapiens
  REGION 1..7: note = Light chain CDR1
QSVSSSY

SEQ ID NO: 9309 - protein, 12 aa, Homo sapiens
  REGION 1..12: note = Light chain CDR1
QSVLYSSNNKNY

SEQ ID NO: 9310 - protein, 6 aa, Homo sapiens
  REGION 1..6: note = Light chain CDR1
QSIGSS

SEQ ID NO: 9311 - protein, 11 aa, Homo sapiens
  REGION 1..11: note = Light chain CDR1
QSLLHSNGLNY

SEQ ID NO: 9312 - protein, 11 aa, Homo sapiens
  REGION 1..11: note = Light chain CDR1
QSLLHSNGYNY

SEQ ID NO: 9313 - protein, 7 aa, Homo sapiens
  REGION 1..7: note = Light chain CDR1
QSVSSSY

SEQ ID NO: 9314 - protein, 6 aa, Homo sapiens
  REGION 1..6: note = Light chain CDR1
QGISNY

SEQ ID NO: 9315 - protein, 7 aa, Homo sapiens
  REGION 1..7: note = Light chain CDR1
QSVSSSY

SEQ ID NO: 9316 - protein, 7 aa, Homo sapiens
  REGION 1..7: note = Light chain CDR1
QSVSSSY

SEQ ID NO: 9317 - protein, 7 aa, Homo sapiens
  REGION 1..7: note = Light chain CDR1
QSVSSSY

SEQ ID NO: 9318 - protein, 7 aa, Homo sapiens
  REGION 1..7: note = Light chain CDR1
QSVSSSY

SEQ ID NO: 9319 - protein, 7 aa, Homo sapiens
  REGION 1..7: note = Light chain CDR1
QSVSSSY

SEQ ID NO: 9320 - protein, 7 aa, Homo sapiens
  REGION 1..7: note = Light chain CDR1
QSVSSNY

SEQ ID NO: 9321 - protein, 7 aa, Homo sapiens
  REGION 1..7: note = Light chain CDR1
QSVSSSY

SEQ ID NO: 9322 - protein, 7 aa, Homo sapiens
  REGION 1..7: note = Light chain CDR1
QSVSSSY

SEQ ID NO: 9323 - protein, 7 aa, Homo sapiens
  REGION 1..7: note = Light chain CDR1
QSFSSSY

SEQ ID NO: 9324 - protein, 6 aa, Homo sapiens
  REGION 1..6: note = Light chain CDR1
QSISSY

SEQ ID NO: 9325 - protein, 7 aa, Homo sapiens
  REGION 1..7: note = Light chain CDR1
QSVSSSY

SEQ ID NO: 9326 - protein, 7 aa, Homo sapiens
  REGION 1..7: note = Light chain CDR1
QSVSSSY

SEQ ID NO: 9327 - protein, 7 aa, Homo sapiens
  REGION 1..7: note = Light chain CDR1
QSVSSSY

SEQ ID NO: 9328 - protein, 7 aa, Homo sapiens
  REGION 1..7: note = Light chain CDR1
QSVSSSY

SEQ ID NO: 9329 - protein, 6 aa, Homo sapiens
  REGION 1..6: note = Light chain CDR1
QGIRYD

SEQ ID NO: 9330 - protein, 7 aa, Homo sapiens
  REGION 1..7: note = Light chain CDR1
QSVSSSY

SEQ ID NO: 9331 - protein, 7 aa, Homo sapiens
  REGION 1..7: note = Light chain CDR1
QTISSSY

SEQ ID NO: 9332 - protein, 7 aa, Homo sapiens
  REGION 1..7: note = Light chain CDR1
QSVSSSY

SEQ ID NO: 9333 - protein, 7 aa, Homo sapiens
  REGION 1..7: note = Light chain CDR1
QTISSSY

SEQ ID NO: 9334 - protein, 7 aa, Homo sapiens
  REGION 1..7: note = Light chain CDR1
QSVSSSY

SEQ ID NO: 9335 - protein, 7 aa, Homo sapiens
  REGION 1..7: note = Light chain CDR1
QTVSSIY

SEQ ID NO: 9336 - protein, 7 aa, Homo sapiens
  REGION 1..7: note = Light chain CDR1
QSVSSSY

SEQ ID NO: 9337 - protein, 7 aa, Homo sapiens
  REGION 1..7: note = Light chain CDR1
QSVSSSY

SEQ ID NO: 9338 - protein, 7 aa, Homo sapiens
  REGION 1..7: note = Light chain CDR1
QSVSSSY

SEQ ID NO: 9339 - protein, 7 aa, Homo sapiens
  REGION 1..7: note = Light chain CDR1
QSVSSSY

SEQ ID NO: 9340 - protein, 7 aa, Homo sapiens
  REGION 1..7: note = Light chain CDR1
QSVSSSY

SEQ ID NO: 9341 - protein, 7 aa, Homo sapiens
  REGION 1..7: note = Light chain CDR1
QSVSSSY

SEQ ID NO: 9342 - protein, 7 aa, Homo sapiens
  REGION 1..7: note = Light chain CDR1
QSVSSSC

SEQ ID NO: 9343 - protein, 7 aa, Homo sapiens
  REGION 1..7: note = Light chain CDR1
QSVSSSC

SEQ ID NO: 9344 - protein, 7 aa, Homo sapiens
  REGION 1..7: note = Light chain CDR1
QSVSSSY

SEQ ID NO: 9345 - protein, 7 aa, Homo sapiens
  REGION 1..7: note = Light chain CDR1
QSVSSSY

SEQ ID NO: 9346 - protein, 7 aa, Homo sapiens
  REGION 1..7: note = Light chain CDR1
QSVSSSY

SEQ ID NO: 9347 - protein, 7 aa, Homo sapiens
  REGION 1..7: note = Light chain CDR1
QSVSSSY

SEQ ID NO: 9348 - protein, 7 aa, Homo sapiens
  REGION 1..7: note = Light chain CDR1
QSVSSSY

SEQ ID NO: 9349 - protein, 5 aa, Homo sapiens
  REGION 1..5: note = Light chain CDR1
QSVSY

SEQ ID NO: 9350 - protein, 7 aa, Homo sapiens
  REGION 1..7: note = Light chain CDR1
QSVSSSY

SEQ ID NO: 9351 - protein, 7 aa, Homo sapiens
  REGION 1..7: note = Light chain CDR1
QSVSSSY

SEQ ID NO: 9352 - protein, 7 aa, Homo sapiens
  REGION 1..7: note = Light chain CDR1
QSVSSSY

SEQ ID NO: 9353 - protein, 11 aa, Homo sapiens
  REGION 1..11: note = Light chain CDR1
QSLLHSNGYNY

SEQ ID NO: 9354 - protein, 7 aa, Homo sapiens
  REGION 1..7: note = Light chain CDR1
QSVSSSY

SEQ ID NO: 9355 - protein, 7 aa, Homo sapiens
  REGION 1..7: note = Light chain CDR1
QSVSSSC

SEQ ID NO: 9356 - protein, 7 aa, Homo sapiens
  REGION 1..7: note = Light chain CDR1
QSVSSSY

SEQ ID NO: 9357 - protein, 7 aa, Homo sapiens
  REGION 1..7: note = Light chain CDR1
QSVSSSC

SEQ ID NO: 9358 - protein, 7 aa, Homo sapiens
  REGION 1..7: note = Light chain CDR1
QSVSSSY

SEQ ID NO: 9359 - protein, 7 aa, Homo sapiens
  REGION 1..7: note = Light chain CDR1
QSVSSSC

SEQ ID NO: 9360 - protein, 7 aa, Homo sapiens
  REGION 1..7: note = Light chain CDR1
QSVSSSC

SEQ ID NO: 9361 - protein, 7 aa, Homo sapiens
  REGION 1..7: note = Light chain CDR1
QSVSSSY

SEQ ID NO: 9362 - protein, 7 aa, Homo sapiens
  REGION 1..7: note = Light chain CDR1
QSVSSSC

SEQ ID NO: 9363 - protein, 7 aa, Homo sapiens
  REGION 1..7: note = Light chain CDR1
QSVSSSY

SEQ ID NO: 9364 - protein, 7 aa, Homo sapiens
  REGION 1..7: note = Light chain CDR1
QSVSSSC

SEQ ID NO: 9365 - protein, 7 aa, Homo sapiens
  REGION 1..7: note = Light chain CDR1
QSVSSSC

SEQ ID NO: 9366 - protein, 7 aa, Homo sapiens
  REGION 1..7: note = Light chain CDR1
QSVSSSY

SEQ ID NO: 9367 - protein, 7 aa, Homo sapiens
  REGION 1..7: note = Light chain CDR1
QSVSSSY

SEQ ID NO: 9368 - protein, 7 aa, Homo sapiens
  REGION 1..7: note = Light chain CDR1
QSVSSSY

SEQ ID NO: 9369 - protein, 7 aa, Homo sapiens
  REGION 1..7: note = Light chain CDR1
QSVSSSY

SEQ ID NO: 9370 - protein, 6 aa, Homo sapiens
  REGION 1..6: note = Light chain CDR1
QSIGSS

SEQ ID NO: 9371 - protein, 7 aa, Homo sapiens
  REGION 1..7: note = Light chain CDR1
QSVSSSY

SEQ ID NO: 9372 - protein, 6 aa, Homo sapiens
  REGION 1..6: note = Light chain CDR1
QAIRND

SEQ ID NO: 9373 - protein, 7 aa, Homo sapiens
  REGION 1..7: note = Light chain CDR1
QSVSSSY

SEQ ID NO: 9374 - protein, 7 aa, Homo sapiens
  REGION 1..7: note = Light chain CDR1
QSVSSSY

SEQ ID NO: 9375 - protein, 7 aa, Homo sapiens
  REGION 1..7: note = Light chain CDR1
QSVSSSY

SEQ ID NO: 9376 - protein, 7 aa, Homo sapiens
  REGION 1..7: note = Light chain CDR1
QSVSSSY

SEQ ID NO: 9377 - protein, 6 aa, Homo sapiens
  REGION 1..6: note = Light chain CDR1
QAIRND

SEQ ID NO: 9378 - protein, 7 aa, Homo sapiens
  REGION 1..7: note = Light chain CDR1
QSVSSSY

SEQ ID NO: 9379 - protein, 7 aa, Homo sapiens
  REGION 1..7: note = Light chain CDR1
QSVSSSY

SEQ ID NO: 9380 - protein, 7 aa, Homo sapiens
  REGION 1..7: note = Light chain CDR1
QSVSSNY

SEQ ID NO: 9381 - protein, 7 aa, Homo sapiens
  REGION 1..7: note = Light chain CDR1
QSVSSSY

SEQ ID NO: 9382 - protein, 7 aa, Homo sapiens
  REGION 1..7: note = Light chain CDR1
QSVSSSY

SEQ ID NO: 9383 - protein, 7 aa, Homo sapiens
  REGION 1..7: note = Light chain CDR1
QSVSSSY

SEQ ID NO: 9384 - protein, 6 aa, Homo sapiens
  REGION 1..6: note = Light chain CDR1
QSISSY

SEQ ID NO: 9385 - protein, 11 aa, Homo sapiens
  REGION 1..11: note = Light chain CDR1
QSLVYSDGNTY

SEQ ID NO: 9386 - protein, 7 aa, Homo sapiens
  REGION 1..7: note = Light chain CDR1
QSVSSSY

SEQ ID NO: 9387 - protein, 7 aa, Homo sapiens
  REGION 1..7: note = Light chain CDR1
QSVSSSY

SEQ ID NO: 9388 - protein, 11 aa, Homo sapiens
  REGION 1..11: note = Light chain CDR1
QSLLHSNGYNY

SEQ ID NO: 9389 - protein, 7 aa, Homo sapiens
  REGION 1..7: note = Light chain CDR1
QSVSSSY

SEQ ID NO: 9390 - protein, 6 aa, Homo sapiens
  REGION 1..6: note = Light chain CDR1
QSISSY

SEQ ID NO: 9391 - protein, 7 aa, Homo sapiens
  REGION 1..7: note = Light chain CDR1
QSVSSSY

SEQ ID NO: 9392 - protein, 6 aa, Homo sapiens
  REGION 1..6: note = Light chain CDR1
QGISNY

SEQ ID NO: 9393 - protein, 6 aa, Homo sapiens
  REGION 1..6: note = Light chain CDR1
QSISSY

SEQ ID NO: 9394 - protein, 7 aa, Homo sapiens
  REGION 1..7: note = Light chain CDR1
QSVSSNF

SEQ ID NO: 9395 - protein, 6 aa, Homo sapiens
  REGION 1..6: note = Light chain CDR1
QGISNY

SEQ ID NO: 9396 - protein, 6 aa, Homo sapiens
  REGION 1..6: note = Light chain CDR1
QSISSY

SEQ ID NO: 9397 - protein, 7 aa, Homo sapiens
  REGION 1..7: note = Light chain CDR1
QSVSSSY

SEQ ID NO: 9398 - protein, 6 aa, Homo sapiens
  REGION 1..6: note = Light chain CDR1
QSISSY

SEQ ID NO: 9399 - protein, 7 aa, Homo sapiens
  REGION 1..7: note = Light chain CDR1
QSVSSSY

SEQ ID NO: 9400 - protein, 7 aa, Homo sapiens
  REGION 1..7: note = Light chain CDR1
QSVSSSY

SEQ ID NO: 9401 - protein, 6 aa, Homo sapiens
  REGION 1..6: note = Light chain CDR1
QGISNY

SEQ ID NO: 9402 - protein, 7 aa, Homo sapiens
  REGION 1..7: note = Light chain CDR1
QSVSSSY

SEQ ID NO: 9403 - protein, 7 aa, Homo sapiens
  REGION 1..7: note = Light chain CDR1
QSVSSSY

SEQ ID NO: 9404 - protein, 7 aa, Homo sapiens
  REGION 1..7: note = Light chain CDR1
QSGSSSY

SEQ ID NO: 9405 - protein, 7 aa, Homo sapiens
  REGION 1..7: note = Light chain CDR1
QSGSSSY

SEQ ID NO: 9406 - protein, 7 aa, Homo sapiens
  REGION 1..7: note = Light chain CDR1
QSVSSSY

SEQ ID NO: 9407 - protein, 7 aa, Homo sapiens
  REGION 1..7: note = Light chain CDR1
QSVSSSY

SEQ ID NO: 9408 - protein, 6 aa, Homo sapiens
  REGION 1..6: note = Light chain CDR1
QGISSY

SEQ ID NO: 9409 - protein, 7 aa, Homo sapiens
  REGION 1..7: note = Light chain CDR1
QSVSSSY

SEQ ID NO: 9410 - protein, 6 aa, Homo sapiens
  REGION 1..6: note = Light chain CDR1
QSIGSS

SEQ ID NO: 9411 - protein, 6 aa, Homo sapiens
  REGION 1..6: note = Light chain CDR1
QSISSY

SEQ ID NO: 9412 - protein, 6 aa, Homo sapiens
  REGION 1..6: note = Light chain CDR1
QGISNY

SEQ ID NO: 9413 - protein, 7 aa, Homo sapiens
  REGION 1..7: note = Light chain CDR1
QSVSSSY

SEQ ID NO: 9414 - protein, 7 aa, Homo sapiens
  REGION 1..7: note = Light chain CDR1
QSVSSSY

SEQ ID NO: 9415 - protein, 6 aa, Homo sapiens
  REGION 1..6: note = Light chain CDR1
QGISNY

SEQ ID NO: 9416 - protein, 7 aa, Homo sapiens
  REGION 1..7: note = Light chain CDR1
QSFSSSY

SEQ ID NO: 9417 - protein, 7 aa, Homo sapiens
  REGION 1..7: note = Light chain CDR1
QSVSSSY

SEQ ID NO: 9418 - protein, 7 aa, Homo sapiens
  REGION 1..7: note = Light chain CDR1
QSVSSSY

SEQ ID NO: 9419 - protein, 7 aa, Homo sapiens
  REGION 1..7: note = Light chain CDR1
QSVSSSY

SEQ ID NO: 9420 - protein, 7 aa, Homo sapiens
  REGION 1..7: note = Light chain CDR1
QSVSSSY

SEQ ID NO: 9421 - protein, 7 aa, Homo sapiens
  REGION 1..7: note = Light chain CDR1
QSVSSSY

SEQ ID NO: 9422 - protein, 7 aa, Homo sapiens
  REGION 1..7: note = Light chain CDR1
QSVFSSY

SEQ ID NO: 9423 - protein, 6 aa, Homo sapiens
  REGION 1..6: note = Light chain CDR1
QSISSY

SEQ ID NO: 9424 - protein, 7 aa, Homo sapiens
  REGION 1..7: note = Light chain CDR1
QSVSSSY

SEQ ID NO: 9425 - protein, 7 aa, Homo sapiens
  REGION 1..7: note = Light chain CDR1
QSVSSSY

SEQ ID NO: 9426 - protein, 7 aa, Homo sapiens
  REGION 1..7: note = Light chain CDR1
QSVSSSY

SEQ ID NO: 9427 - protein, 7 aa, Homo sapiens
  REGION 1..7: note = Light chain CDR1
QSVSSSY

SEQ ID NO: 9428 - protein, 7 aa, Homo sapiens
  REGION 1..7: note = Light chain CDR1
QSVSSSY

SEQ ID NO: 9429 - protein, 7 aa, Homo sapiens
  REGION 1..7: note = Light chain CDR1
QSVSSSY

SEQ ID NO: 9430 - protein, 6 aa, Homo sapiens
  REGION 1..6: note = Light chain CDR1
QGISNY

SEQ ID NO: 9431 - protein, 7 aa, Homo sapiens
  REGION 1..7: note = Light chain CDR1
QSVSSSY

SEQ ID NO: 9432 - protein, 7 aa, Homo sapiens
  REGION 1..7: note = Light chain CDR1
QSVSSSY

SEQ ID NO: 9433 - protein, 7 aa, Homo sapiens
  REGION 1..7: note = Light chain CDR1
QSVSSSY

SEQ ID NO: 9434 - protein, 6 aa, Homo sapiens
  REGION 1..6: note = Light chain CDR1
QSVSSY

SEQ ID NO: 9435 - protein, 7 aa, Homo sapiens
  REGION 1..7: note = Light chain CDR1
QSVSSSY

SEQ ID NO: 9436 - protein, 7 aa, Homo sapiens
  REGION 1..7: note = Light chain CDR1
QSVSSSY

SEQ ID NO: 9437 - protein, 7 aa, Homo sapiens
  REGION 1..7: note = Light chain CDR1
QSVSSSY

SEQ ID NO: 9438 - protein, 7 aa, Homo sapiens
  REGION 1..7: note = Light chain CDR1
QSVSSSY

SEQ ID NO: 9439 - protein, 7 aa, Homo sapiens
  REGION 1..7: note = Light chain CDR1
QSVSSSY

SEQ ID NO: 9440 - protein, 7 aa, Homo sapiens
  REGION 1..7: note = Light chain CDR1
QSGSSSY

SEQ ID NO: 9441 - protein, 5 aa, Homo sapiens
  REGION 1..5: note = Light chain CDR1
QSVSY

SEQ ID NO: 9442 - protein, 7 aa, Homo sapiens
  REGION 1..7: note = Light chain CDR1
QSVSSSY

SEQ ID NO: 9443 - protein, 7 aa, Homo sapiens
  REGION 1..7: note = Light chain CDR1
QSVSSSY

SEQ ID NO: 9444 - protein, 5 aa, Homo sapiens
  REGION 1..5: note = Light chain CDR1
QSVSY

SEQ ID NO: 9445 - protein, 7 aa, Homo sapiens
  REGION 1..7: note = Light chain CDR1
QSVSSSY

SEQ ID NO: 9446 - protein, 6 aa, Homo sapiens
  REGION 1..6: note = Light chain CDR1
QGISNY

SEQ ID NO: 9447 - protein, 7 aa, Homo sapiens
  REGION 1..7: note = Light chain CDR1
QSVSSSY

SEQ ID NO: 9448 - protein, 7 aa, Homo sapiens
  REGION 1..7: note = Light chain CDR1
QSVSSSY

SEQ ID NO: 9449 - protein, 11 aa, Homo sapiens
  REGION 1..11: note = Light chain CDR1
QSLLHSNGYNY

SEQ ID NO: 9450 - protein, 7 aa, Homo sapiens
  REGION 1..7: note = Light chain CDR1
QSVSSSY

SEQ ID NO: 9451 - protein, 7 aa, Homo sapiens
  REGION 1..7: note = Light chain CDR1
QSVSSSY

SEQ ID NO: 9452 - protein, 7 aa, Homo sapiens
  REGION 1..7: note = Light chain CDR1
QSVSSSY

SEQ ID NO: 9453 - protein, 7 aa, Homo sapiens
  REGION 1..7: note = Light chain CDR1
QSVSSSY

SEQ ID NO: 9454 - protein, 6 aa, Homo sapiens
  REGION 1..6: note = Light chain CDR1
QGISNY

SEQ ID NO: 9455 - protein, 7 aa, Homo sapiens
  REGION 1..7: note = Light chain CDR1
QSVSSSY

SEQ ID NO: 9456 - protein, 5 aa, Homo sapiens
  REGION 1..5: note = Light chain CDR1
QSVSY

SEQ ID NO: 9457 - protein, 5 aa, Homo sapiens
  REGION 1..5: note = Light chain CDR1
QSVSY

SEQ ID NO: 9458 - protein, 5 aa, Homo sapiens
  REGION 1..5: note = Light chain CDR1
QSVSY

SEQ ID NO: 9459 - protein, 5 aa, Homo sapiens
  REGION 1..5: note = Light chain CDR1
QSVSY

SEQ ID NO: 9460 - protein, 7 aa, Homo sapiens
  REGION 1..7: note = Light chain CDR1
QSVSSSY

SEQ ID NO: 9461 - protein, 7 aa, Homo sapiens
  REGION 1..7: note = Light chain CDR1
QSVSSSY

SEQ ID NO: 9462 - protein, 5 aa, Homo sapiens
  REGION 1..5: note = Light chain CDR1
QSVSY

SEQ ID NO: 9463 - protein, 5 aa, Homo sapiens
  REGION 1..5: note = Light chain CDR1
QSVSY

SEQ ID NO: 9464 - protein, 7 aa, Homo sapiens
  REGION 1..7: note = Light chain CDR1
QSVSSSY

SEQ ID NO: 9465 - protein, 6 aa, Homo sapiens
  REGION 1..6: note = Light chain CDR1
QSVSSY

SEQ ID NO: 9466 - protein, 5 aa, Homo sapiens
  REGION 1..5: note = Light chain CDR1
QSVSY

SEQ ID NO: 9467 - protein, 7 aa, Homo sapiens
  REGION 1..7: note = Light chain CDR1
QSVSSSY

SEQ ID NO: 9468 - protein, 5 aa, Homo sapiens
  REGION 1..5: note = Light chain CDR1
QSVSY

SEQ ID NO: 9469 - protein, 6 aa, Homo sapiens
  REGION 1..6: note = Light chain CDR1
QRISSY

SEQ ID NO: 9470 - protein, 5 aa, Homo sapiens
  REGION 1..5: note = Light chain CDR1
QSVSY

SEQ ID NO: 9471 - protein, 7 aa, Homo sapiens
  REGION 1..7: note = Light chain CDR1
QSVSSSY

SEQ ID NO: 9472 - protein, 7 aa, Homo sapiens
  REGION 1..7: note = Light chain CDR1
QSVSSSY

SEQ ID NO: 9473 - protein, 7 aa, Homo sapiens
  REGION 1..7: note = Light chain CDR1
QSVNNRY

SEQ ID NO: 9474 - protein, 5 aa, Homo sapiens
  REGION 1..5: note = Light chain CDR1
QSVSY

SEQ ID NO: 9475 - protein, 5 aa, Homo sapiens
  REGION 1..5: note = Light chain CDR1
QSVSY

SEQ ID NO: 9476 - protein, 7 aa, Homo sapiens
  REGION 1..7: note = Light chain CDR1
QSVSSSY

SEQ ID NO: 9477 - protein, 7 aa, Homo sapiens
  REGION 1..7: note = Light chain CDR1
QSVSSSY

SEQ ID NO: 9478 - protein, 7 aa, Homo sapiens
  REGION 1..7: note = Light chain CDR1
QSVSSSY

SEQ ID NO: 9479 - protein, 7 aa, Homo sapiens
  REGION 1..7: note = Light chain CDR1
QSVSSSY

SEQ ID NO: 9480 - protein, 7 aa, Homo sapiens
  REGION 1..7: note = Light chain CDR1
QSVSSSY

SEQ ID NO: 9481 - protein, 7 aa, Homo sapiens
  REGION 1..7: note = Light chain CDR1
QSVSSSY

SEQ ID NO: 9482 - protein, 5 aa, Homo sapiens
  REGION 1..5: note = Light chain CDR1
QSVSY

SEQ ID NO: 9483 - protein, 7 aa, Homo sapiens
  REGION 1..7: note = Light chain CDR1
QSVSSSY

SEQ ID NO: 9484 - protein, 7 aa, Homo sapiens
  REGION 1..7: note = Light chain CDR1
QSVGSNY

SEQ ID NO: 9485 - protein, 7 aa, Homo sapiens
  REGION 1..7: note = Light chain CDR1
QSVSSSY

SEQ ID NO: 9486 - protein, 7 aa, Homo sapiens
  REGION 1..7: note = Light chain CDR1
QSVSSSY

SEQ ID NO: 9487 - protein, 7 aa, Homo sapiens
  REGION 1..7: note = Light chain CDR1
QSVSSSY

SEQ ID NO: 9488-9983 - skipped (496 entries)

SEQ ID NO: 9984 - protein, 9 aa, Homo sapiens
  REGION 1..9: note = Light chain CDR3
QQSYSTPYT

SEQ ID NO: 9985 - protein, 9 aa, Homo sapiens
  REGION 1..9: note = Light chain CDR3
QKYNSAPLT

SEQ ID NO: 9986 - protein, 9 aa, Homo sapiens
  REGION 1..9: note = Light chain CDR3
QQYNNWPYT

SEQ ID NO: 9987 - protein, 9 aa, Homo sapiens
  REGION 1..9: note = Light chain CDR3
LQHNTYPFT

SEQ ID NO: 9988 - protein, 9 aa, Homo sapiens
  REGION 1..9: note = Light chain CDR3
LQHNSYPYT

SEQ ID NO: 9989 - protein, 9 aa, Homo sapiens
  REGION 1..9: note = Light chain CDR3
LQHNSYPYT

SEQ ID NO: 9990 - protein, 9 aa, Homo sapiens
  REGION 1..9: note = Light chain CDR3
QQFNSYPYT

SEQ ID NO: 9991 - protein, 9 aa, Homo sapiens
  REGION 1..9: note = Light chain CDR3
QQYGNSPYT

SEQ ID NO: 9992 - protein, 9 aa, Homo sapiens
  REGION 1..9: note = Light chain CDR3
LQHNSYPWT

SEQ ID NO: 9993 - protein, 9 aa, Homo sapiens
  REGION 1..9: note = Light chain CDR3
LQHNSYPWT

SEQ ID NO: 9994 - protein, 9 aa, Homo sapiens
  REGION 1..9: note = Light chain CDR3
LQHNSYPWT

SEQ ID NO: 9995 - protein, 9 aa, Homo sapiens
  REGION 1..9: note = Light chain CDR3
LQHNSYPFT

SEQ ID NO: 9996 - protein, 9 aa, Homo sapiens
  REGION 1..9: note = Light chain CDR3
QQYGSSPRT

SEQ ID NO: 9997 - protein, 8 aa, Homo sapiens
  REGION 1..8: note = Light chain CDR3
QQYGSSYT

SEQ ID NO: 9998 - protein, 9 aa, Homo sapiens
  REGION 1..9: note = Light chain CDR3
QKYNSAPYT

SEQ ID NO: 9999 - protein, 9 aa, Homo sapiens
  REGION 1..9: note = Light chain CDR3
QQLNSYPRT

SEQ ID NO: 10000 - protein, 9 aa, Homo sapiens
  REGION 1..9: note = Light chain CDR3
LQHNSYPWT

SEQ ID NO: 10001 - protein, 9 aa, Homo sapiens
  REGION 1..9: note = Light chain CDR3
QQSYSTPIT

SEQ ID NO: 10002 - protein, 9 aa, Homo sapiens
  REGION 1..9: note = Light chain CDR3
QQLNSYPYT

SEQ ID NO: 10003 - protein, 9 aa, Homo sapiens
  REGION 1..9: note = Light chain CDR3
QQSYSTPYT

SEQ ID NO: 10004 - protein, 9 aa, Homo sapiens
  REGION 1..9: note = Light chain CDR3
QQSYSTPYT

SEQ ID NO: 10005 - protein, 9 aa, Homo sapiens
  REGION 1..9: note = Light chain CDR3
QQSYSTPIT

SEQ ID NO: 10006 - protein, 9 aa, Homo sapiens
  REGION 1..9: note = Light chain CDR3
QQSYSYPYT

SEQ ID NO: 10007 - protein, 9 aa, Homo sapiens
  REGION 1..9: note = Light chain CDR3
QQSYSTPYT

SEQ ID NO: 10008 - protein, 9 aa, Homo sapiens
  REGION 1..9: note = Light chain CDR3
QQFNSYPYT

SEQ ID NO: 10009 - protein, 9 aa, Homo sapiens
  REGION 1..9: note = Light chain CDR3
QQSYSTPYT

SEQ ID NO: 10010 - protein, 9 aa, Homo sapiens
  REGION 1..9: note = Light chain CDR3
LQHNSYPWT

SEQ ID NO: 10011 - protein, 9 aa, Homo sapiens
  REGION 1..9: note = Light chain CDR3
QQLNSYPRT

SEQ ID NO: 10012 - protein, 9 aa, Homo sapiens
  REGION 1..9: note = Light chain CDR3
QQYGSSPYT

SEQ ID NO: 10013 - protein, 9 aa, Homo sapiens
  REGION 1..9: note = Light chain CDR3
QQSYSTPYT

SEQ ID NO: 10014 - protein, 9 aa, Homo sapiens
  REGION 1..9: note = Light chain CDR3
LQDYNYPWT

SEQ ID NO: 10015 - protein, 8 aa, Homo sapiens
  REGION 1..8: note = Light chain CDR3
QQYGSSYT

SEQ ID NO: 10016 - protein, 9 aa, Homo sapiens
  REGION 1..9: note = Light chain CDR3
QQSYSTPYT

SEQ ID NO: 10017 - protein, 9 aa, Homo sapiens
  REGION 1..9: note = Light chain CDR3
QQSYSTPYT

SEQ ID NO: 10018 - protein, 9 aa, Homo sapiens
  REGION 1..9: note = Light chain CDR3
LQHNSYPWT

SEQ ID NO: 10019 - protein, 9 aa, Homo sapiens
  REGION 1..9: note = Light chain CDR3
QQFNSYPYT

SEQ ID NO: 10020 - protein, 9 aa, Homo sapiens
  REGION 1..9: note = Light chain CDR3
QQSYSTPYT

SEQ ID NO: 10021 - protein, 9 aa, Homo sapiens
  REGION 1..9: note = Light chain CDR3
QQSYSTPYT

SEQ ID NO: 10022 - protein, 8 aa, Homo sapiens
  REGION 1..8: note = Light chain CDR3
QQYGSSYT

SEQ ID NO: 10023 - protein, 9 aa, Homo sapiens
  REGION 1..9: note = Light chain CDR3
LQHNSYPWT

SEQ ID NO: 10024 - protein, 9 aa, Homo sapiens
  REGION 1..9: note = Light chain CDR3
QQDYNLPYT

SEQ ID NO: 10025 - protein, 9 aa, Homo sapiens
  REGION 1..9: note = Light chain CDR3
QQSYSNPLT

SEQ ID NO: 10026 - protein, 9 aa, Homo sapiens
  REGION 1..9: note = Light chain CDR3
QQSYSTPYT

SEQ ID NO: 10027 - protein, 9 aa, Homo sapiens
  REGION 1..9: note = Light chain CDR3
QQDYNLPLT

SEQ ID NO: 10028 - protein, 9 aa, Homo sapiens
  REGION 1..9: note = Light chain CDR3
QQFNSYPYT

SEQ ID NO: 10029 - protein, 9 aa, Homo sapiens
  REGION 1..9: note = Light chain CDR3
LQHNSYPWT

SEQ ID NO: 10030 - protein, 9 aa, Homo sapiens
  REGION 1..9: note = Light chain CDR3
QQSYSTPFT

SEQ ID NO: 10031 - protein, 9 aa, Homo sapiens
  REGION 1..9: note = Light chain CDR3
QQSYSTPFT

SEQ ID NO: 10032 - protein, 9 aa, Homo sapiens
  REGION 1..9: note = Light chain CDR3
QQYGSSPWT

SEQ ID NO: 10033 - protein, 9 aa, Homo sapiens
  REGION 1..9: note = Light chain CDR3
QQYGSSPFT

SEQ ID NO: 10034 - protein, 9 aa, Homo sapiens
  REGION 1..9: note = Light chain CDR3
QQYDNLPIT

SEQ ID NO: 10035 - protein, 9 aa, Homo sapiens
  REGION 1..9: note = Light chain CDR3
QQYGSSPWT

SEQ ID NO: 10036 - protein, 9 aa, Homo sapiens
  REGION 1..9: note = Light chain CDR3
QQYGSSPWT

SEQ ID NO: 10037 - protein, 9 aa, Homo sapiens
  REGION 1..9: note = Light chain CDR3
MQALQTPLT

SEQ ID NO: 10038 - protein, 9 aa, Homo sapiens
  REGION 1..9: note = Light chain CDR3
QQSYSTPFT

SEQ ID NO: 10039 - protein, 9 aa, Homo sapiens
  REGION 1..9: note = Light chain CDR3
QQYGSSPWT

SEQ ID NO: 10040 - protein, 9 aa, Homo sapiens
  REGION 1..9: note = Light chain CDR3
QQYGRSPWT

SEQ ID NO: 10041 - protein, 9 aa, Homo sapiens
  REGION 1..9: note = Light chain CDR3
QQYGNSPWT

SEQ ID NO: 10042 - protein, 9 aa, Homo sapiens
  REGION 1..9: note = Light chain CDR3
QQSYSTPFT

SEQ ID NO: 10043 - protein, 9 aa, Homo sapiens
  REGION 1..9: note = Light chain CDR3
QQYGTSPWT

SEQ ID NO: 10044 - protein, 9 aa, Homo sapiens
  REGION 1..9: note = Light chain CDR3
QQSYSTPFT

SEQ ID NO: 10045 - protein, 9 aa, Homo sapiens
  REGION 1..9: note = Light chain CDR3
QQYGSSPFT

SEQ ID NO: 10046 - protein, 9 aa, Homo sapiens
  REGION 1..9: note = Light chain CDR3
QQYGSSPFT

SEQ ID NO: 10047 - protein, 9 aa, Homo sapiens
  REGION 1..9: note = Light chain CDR3
QQYGSSPFT

SEQ ID NO: 10048 - protein, 9 aa, Homo sapiens
  REGION 1..9: note = Light chain CDR3
QQYGSSPWT

SEQ ID NO: 10049 - protein, 9 aa, Homo sapiens
  REGION 1..9: note = Light chain CDR3
MQALQTPLT

SEQ ID NO: 10050 - protein, 9 aa, Homo sapiens
  REGION 1..9: note = Light chain CDR3
QQYGSSPFT

SEQ ID NO: 10051 - protein, 9 aa, Homo sapiens
  REGION 1..9: note = Light chain CDR3
QQSYSTPFT

SEQ ID NO: 10052 - protein, 9 aa, Homo sapiens
  REGION 1..9: note = Light chain CDR3
QQSYSTPFT

SEQ ID NO: 10053 - protein, 9 aa, Homo sapiens
  REGION 1..9: note = Light chain CDR3
QQGYSTPFT

SEQ ID NO: 10054 - protein, 9 aa, Homo sapiens
  REGION 1..9: note = Light chain CDR3
QQYGSSPWT

SEQ ID NO: 10055 - protein, 9 aa, Homo sapiens
  REGION 1..9: note = Light chain CDR3
QQSYSTPFA

SEQ ID NO: 10056 - protein, 9 aa, Homo sapiens
  REGION 1..9: note = Light chain CDR3
QQSYSTPFT

SEQ ID NO: 10057 - protein, 9 aa, Homo sapiens
  REGION 1..9: note = Light chain CDR3
QQYGSSPFT

SEQ ID NO: 10058 - protein, 9 aa, Homo sapiens
  REGION 1..9: note = Light chain CDR3
QQSYSTPFT

SEQ ID NO: 10059 - protein, 9 aa, Homo sapiens
  REGION 1..9: note = Light chain CDR3
QQYGSSPWT

SEQ ID NO: 10060 - protein, 9 aa, Homo sapiens
  REGION 1..9: note = Light chain CDR3
QQSYSTPFT

SEQ ID NO: 10061 - protein, 9 aa, Homo sapiens
  REGION 1..9: note = Light chain CDR3
QQYGSSPWT

SEQ ID NO: 10062 - protein, 9 aa, Homo sapiens
  REGION 1..9: note = Light chain CDR3
QQYGSSPWT

SEQ ID NO: 10063 - protein, 9 aa, Homo sapiens
  REGION 1..9: note = Light chain CDR3
QQSYSTPFT

SEQ ID NO: 10064 - protein, 9 aa, Homo sapiens
  REGION 1..9: note = Light chain CDR3
QQSYSTPFT

SEQ ID NO: 10065 - protein, 9 aa, Homo sapiens
  REGION 1..9: note = Light chain CDR3
QQFGSSPWT

SEQ ID NO: 10066 - protein, 9 aa, Homo sapiens
  REGION 1..9: note = Light chain CDR3
QQLNSYPRT

SEQ ID NO: 10067 - protein, 9 aa, Homo sapiens
  REGION 1..9: note = Light chain CDR3
MQALQTPLT

SEQ ID NO: 10068 - protein, 9 aa, Homo sapiens
  REGION 1..9: note = Light chain CDR3
QQYGTSPWT

SEQ ID NO: 10069 - protein, 9 aa, Homo sapiens
  REGION 1..9: note = Light chain CDR3
QQYGTSPFT

SEQ ID NO: 10070 - protein, 9 aa, Homo sapiens
  REGION 1..9: note = Light chain CDR3
QQYGNSPWT

SEQ ID NO: 10071 - protein, 9 aa, Homo sapiens
  REGION 1..9: note = Light chain CDR3
QQSYSTPYT

SEQ ID NO: 10072 - protein, 9 aa, Homo sapiens
  REGION 1..9: note = Light chain CDR3
LQHNSYPWT

SEQ ID NO: 10073 - protein, 9 aa, Homo sapiens
  REGION 1..9: note = Light chain CDR3
MQALQTPLT

SEQ ID NO: 10074 - protein, 9 aa, Homo sapiens
  REGION 1..9: note = Light chain CDR3
QQYGSSPFT

SEQ ID NO: 10075 - protein, 9 aa, Homo sapiens
  REGION 1..9: note = Light chain CDR3
LQHNSYPRT

SEQ ID NO: 10076 - protein, 9 aa, Homo sapiens
  REGION 1..9: note = Light chain CDR3
LQHNSYPWT

SEQ ID NO: 10077 - protein, 9 aa, Homo sapiens
  REGION 1..9: note = Light chain CDR3
QQYGNSPWT

SEQ ID NO: 10078 - protein, 9 aa, Homo sapiens
  REGION 1..9: note = Light chain CDR3
LQDYNYPRT

SEQ ID NO: 10079 - protein, 9 aa, Homo sapiens
  REGION 1..9: note = Light chain CDR3
LQDYNYPYT

SEQ ID NO: 10080 - protein, 9 aa, Homo sapiens
  REGION 1..9: note = Light chain CDR3
QQLNSYPRT

SEQ ID NO: 10081 - protein, 9 aa, Homo sapiens
  REGION 1..9: note = Light chain CDR3
QQSYSTPFT

SEQ ID NO: 10082 - protein, 9 aa, Homo sapiens
  REGION 1..9: note = Light chain CDR3
LQDYNYPRT

SEQ ID NO: 10083 - protein, 9 aa, Homo sapiens
  REGION 1..9: note = Light chain CDR3
MQALQTPLT

SEQ ID NO: 10084 - protein, 9 aa, Homo sapiens
  REGION 1..9: note = Light chain CDR3
LQHNSYPWT

SEQ ID NO: 10085 - protein, 9 aa, Homo sapiens
  REGION 1..9: note = Light chain CDR3
LQLNSYPRT

SEQ ID NO: 10086 - protein, 9 aa, Homo sapiens
  REGION 1..9: note = Light chain CDR3
LQNYNYPRT

SEQ ID NO: 10087 - protein, 9 aa, Homo sapiens
  REGION 1..9: note = Light chain CDR3
QQDYNLPYT

SEQ ID NO: 10088 - protein, 9 aa, Homo sapiens
  REGION 1..9: note = Light chain CDR3
QQSYSTPYT

SEQ ID NO: 10089 - protein, 9 aa, Homo sapiens
  REGION 1..9: note = Light chain CDR3
QQLNSYPRT

SEQ ID NO: 10090 - protein, 9 aa, Homo sapiens
  REGION 1..9: note = Light chain CDR3
LQHNSYPWT

SEQ ID NO: 10091 - protein, 9 aa, Homo sapiens
  REGION 1..9: note = Light chain CDR3
QQYNSYPYT

SEQ ID NO: 10092 - protein, 9 aa, Homo sapiens
  REGION 1..9: note = Light chain CDR3
LQDYNYPWT

SEQ ID NO: 10093 - protein, 9 aa, Homo sapiens
  REGION 1..9: note = Light chain CDR3
QQYNSYPRT

SEQ ID NO: 10094 - protein, 9 aa, Homo sapiens
  REGION 1..9: note = Light chain CDR3
QQSYSTPFT

SEQ ID NO: 10095 - protein, 9 aa, Homo sapiens
  REGION 1..9: note = Light chain CDR3
QQYGSSPLT

SEQ ID NO: 10096 - protein, 9 aa, Homo sapiens
  REGION 1..9: note = Light chain CDR3
LQHNSYPYT

SEQ ID NO: 10097 - protein, 9 aa, Homo sapiens
  REGION 1..9: note = Light chain CDR3
QQSYSTPFT

SEQ ID NO: 10098 - protein, 9 aa, Homo sapiens
  REGION 1..9: note = Light chain CDR3
QQSYSTPFT

SEQ ID NO: 10099 - protein, 9 aa, Homo sapiens
  REGION 1..9: note = Light chain CDR3
LQLNSYPRT

SEQ ID NO: 10100 - protein, 9 aa, Homo sapiens
  REGION 1..9: note = Light chain CDR3
LQDYNYPWT

SEQ ID NO: 10101 - protein, 9 aa, Homo sapiens
  REGION 1..9: note = Light chain CDR3
LQHNSYPRT

SEQ ID NO: 10102 - protein, 9 aa, Homo sapiens
  REGION 1..9: note = Light chain CDR3
KQSYSTPYT

SEQ ID NO: 10103 - protein, 9 aa, Homo sapiens
  REGION 1..9: note = Light chain CDR3
QQYGNSPWT

SEQ ID NO: 10104 - protein, 9 aa, Homo sapiens
  REGION 1..9: note = Light chain CDR3
LQRNSYPWT

SEQ ID NO: 10105 - protein, 9 aa, Homo sapiens
  REGION 1..9: note = Light chain CDR3
QQFGSSPWT

SEQ ID NO: 10106 - protein, 9 aa, Homo sapiens
  REGION 1..9: note = Light chain CDR3
LQHNSYPWT

SEQ ID NO: 10107 - protein, 9 aa, Homo sapiens
  REGION 1..9: note = Light chain CDR3
RQLNSYPWT

SEQ ID NO: 10108 - protein, 9 aa, Homo sapiens
  REGION 1..9: note = Light chain CDR3
QQYNSYPRT

SEQ ID NO: 10109 - protein, 9 aa, Homo sapiens
  REGION 1..9: note = Light chain CDR3
QQLNSYPWT

SEQ ID NO: 10110 - protein, 9 aa, Homo sapiens
  REGION 1..9: note = Light chain CDR3
KQLNSYPRT

SEQ ID NO: 10111 - protein, 9 aa, Homo sapiens
  REGION 1..9: note = Light chain CDR3
QQFGSSPWT

SEQ ID NO: 10112 - protein, 9 aa, Homo sapiens
  REGION 1..9: note = Light chain CDR3
QQLNSYPRT

SEQ ID NO: 10113 - protein, 9 aa, Homo sapiens
  REGION 1..9: note = Light chain CDR3
MQALQTPLT

SEQ ID NO: 10114 - protein, 9 aa, Homo sapiens
  REGION 1..9: note = Light chain CDR3
QQSYSTPYT

SEQ ID NO: 10115 - protein, 9 aa, Homo sapiens
  REGION 1..9: note = Light chain CDR3
QQYGSSPWT

SEQ ID NO: 10116 - protein, 9 aa, Homo sapiens
  REGION 1..9: note = Light chain CDR3
QQYNSYPYT

SEQ ID NO: 10117 - protein, 9 aa, Homo sapiens
  REGION 1..9: note = Light chain CDR3
QQYKSYPYT

SEQ ID NO: 10118 - protein, 9 aa, Homo sapiens
  REGION 1..9: note = Light chain CDR3
QQYGNSPFT

SEQ ID NO: 10119 - protein, 9 aa, Homo sapiens
  REGION 1..9: note = Light chain CDR3
QQYKSYPYT

SEQ ID NO: 10120 - protein, 9 aa, Homo sapiens
  REGION 1..9: note = Light chain CDR3
QQYGSSPFT

SEQ ID NO: 10121 - protein, 9 aa, Homo sapiens
  REGION 1..9: note = Light chain CDR3
QQYGSSPWT

SEQ ID NO: 10122 - protein, 9 aa, Homo sapiens
  REGION 1..9: note = Light chain CDR3
QQYGRSPFT

SEQ ID NO: 10123 - protein, 9 aa, Homo sapiens
  REGION 1..9: note = Light chain CDR3
QQYGRSPFT

SEQ ID NO: 10124 - protein, 9 aa, Homo sapiens
  REGION 1..9: note = Light chain CDR3
QRTYSAPYT

SEQ ID NO: 10125 - protein, 9 aa, Homo sapiens
  REGION 1..9: note = Light chain CDR3
QQLNNYPYT

SEQ ID NO: 10126 - protein, 9 aa, Homo sapiens
  REGION 1..9: note = Light chain CDR3
QQYGSSPFT

SEQ ID NO: 10127 - protein, 9 aa, Homo sapiens
  REGION 1..9: note = Light chain CDR3
QRTYNAPYT

SEQ ID NO: 10128 - protein, 9 aa, Homo sapiens
  REGION 1..9: note = Light chain CDR3
QQFGSSPWT

SEQ ID NO: 10129 - protein, 9 aa, Homo sapiens
  REGION 1..9: note = Light chain CDR3
QQYGSSPFT

SEQ ID NO: 10130 - protein, 9 aa, Homo sapiens
  REGION 1..9: note = Light chain CDR3
QQYGSSPFT

SEQ ID NO: 10131 - protein, 9 aa, Homo sapiens
  REGION 1..9: note = Light chain CDR3
QQYGSSPWT

SEQ ID NO: 10132 - protein, 9 aa, Homo sapiens
  REGION 1..9: note = Light chain CDR3
HQSSSLPFT

SEQ ID NO: 10133 - protein, 9 aa, Homo sapiens
  REGION 1..9: note = Light chain CDR3
QQYGTSPWT

SEQ ID NO: 10134 - protein, 9 aa, Homo sapiens
  REGION 1..9: note = Light chain CDR3
HQSSSLPFT

SEQ ID NO: 10135 - protein, 9 aa, Homo sapiens
  REGION 1..9: note = Light chain CDR3
QQDYNLPFT

SEQ ID NO: 10136 - protein, 9 aa, Homo sapiens
  REGION 1..9: note = Light chain CDR3
QQFGSSPFT

SEQ ID NO: 10137 - protein, 9 aa, Homo sapiens
  REGION 1..9: note = Light chain CDR3
QQYKSYPYT

SEQ ID NO: 10138 - protein, 9 aa, Homo sapiens
  REGION 1..9: note = Light chain CDR3
QQYKSYPYT

SEQ ID NO: 10139 - protein, 9 aa, Homo sapiens
  REGION 1..9: note = Light chain CDR3
QKYDSAPFT

SEQ ID NO: 10140 - protein, 9 aa, Homo sapiens
  REGION 1..9: note = Light chain CDR3
QQLNNYPYT

SEQ ID NO: 10141 - protein, 9 aa, Homo sapiens
  REGION 1..9: note = Light chain CDR3
QQYGSSPWT

SEQ ID NO: 10142 - protein, 9 aa, Homo sapiens
  REGION 1..9: note = Light chain CDR3
QQLNNYPST

SEQ ID NO: 10143 - protein, 9 aa, Homo sapiens
  REGION 1..9: note = Light chain CDR3
QQYKSYPYT

SEQ ID NO: 10144 - protein, 9 aa, Homo sapiens
  REGION 1..9: note = Light chain CDR3
QQLNNYPCT

SEQ ID NO: 10145 - protein, 9 aa, Homo sapiens
  REGION 1..9: note = Light chain CDR3
QQYGSSPWT

SEQ ID NO: 10146 - protein, 9 aa, Homo sapiens
  REGION 1..9: note = Light chain CDR3
QQLNNYPYT

SEQ ID NO: 10147 - protein, 9 aa, Homo sapiens
  REGION 1..9: note = Light chain CDR3
QQFGRSPFT

SEQ ID NO: 10148 - protein, 9 aa, Homo sapiens
  REGION 1..9: note = Light chain CDR3
QQYGSSPWT

SEQ ID NO: 10149 - protein, 9 aa, Homo sapiens
  REGION 1..9: note = Light chain CDR3
QQYGTSPFT

SEQ ID NO: 10150 - protein, 9 aa, Homo sapiens
  REGION 1..9: note = Light chain CDR3
QQYGSSPFT

SEQ ID NO: 10151 - protein, 9 aa, Homo sapiens
  REGION 1..9: note = Light chain CDR3
QQYGRSPFT

SEQ ID NO: 10152 - protein, 9 aa, Homo sapiens
  REGION 1..9: note = Light chain CDR3
QQYKSYPYT

SEQ ID NO: 10153 - protein, 9 aa, Homo sapiens
  REGION 1..9: note = Light chain CDR3
QQYSRSPWT

SEQ ID NO: 10154 - protein, 9 aa, Homo sapiens
  REGION 1..9: note = Light chain CDR3
QQYKTYPYT

SEQ ID NO: 10155 - protein, 9 aa, Homo sapiens
  REGION 1..9: note = Light chain CDR3
QQYGSSPWT

SEQ ID NO: 10156 - protein, 9 aa, Homo sapiens
  REGION 1..9: note = Light chain CDR3
QQFGSSPFT

SEQ ID NO: 10157 - protein, 9 aa, Homo sapiens
  REGION 1..9: note = Light chain CDR3
QQYGSSPFT

SEQ ID NO: 10158 - protein, 9 aa, Homo sapiens
  REGION 1..9: note = Light chain CDR3
QQYGSSPWT

SEQ ID NO: 10159 - protein, 9 aa, Homo sapiens
  REGION 1..9: note = Light chain CDR3
QQYGRSPWT

SEQ ID NO: 10160 - protein, 9 aa, Homo sapiens
  REGION 1..9: note = Light chain CDR3
QQYNSYPYT

SEQ ID NO: 10161 - protein, 9 aa, Homo sapiens
  REGION 1..9: note = Light chain CDR3
QQYGSSPFT

SEQ ID NO: 10162 - protein, 9 aa, Homo sapiens
  REGION 1..9: note = Light chain CDR3
HQYGSSPFT

SEQ ID NO: 10163 - protein, 9 aa, Homo sapiens
  REGION 1..9: note = Light chain CDR3
QQYGSSPWT

SEQ ID NO: 10164 - protein, 9 aa, Homo sapiens
  REGION 1..9: note = Light chain CDR3
QQYKSYPYT

SEQ ID NO: 10165 - protein, 9 aa, Homo sapiens
  REGION 1..9: note = Light chain CDR3
QQYNSYPYT

SEQ ID NO: 10166 - protein, 9 aa, Homo sapiens
  REGION 1..9: note = Light chain CDR3
QQYGSSPFT

SEQ ID NO: 10167 - protein, 9 aa, Homo sapiens
  REGION 1..9: note = Light chain CDR3
HQSSSLPFT

SEQ ID NO: 10168 - protein, 9 aa, Homo sapiens
  REGION 1..9: note = Light chain CDR3
QKYDSAPFT

SEQ ID NO: 10169 - protein, 9 aa, Homo sapiens
  REGION 1..9: note = Light chain CDR3
QRTYSAPYT

SEQ ID NO: 10170 - protein, 9 aa, Homo sapiens
  REGION 1..9: note = Light chain CDR3
QRTYSAPYT

SEQ ID NO: 10171 - protein, 9 aa, Homo sapiens
  REGION 1..9: note = Light chain CDR3
QQYGSSPWT

SEQ ID NO: 10172 - protein, 9 aa, Homo sapiens
  REGION 1..9: note = Light chain CDR3
QQYGSSPFT

SEQ ID NO: 10173 - protein, 9 aa, Homo sapiens
  REGION 1..9: note = Light chain CDR3
QQYGTSPWT

SEQ ID NO: 10174 - protein, 9 aa, Homo sapiens
  REGION 1..9: note = Light chain CDR3
QQYKNYPYT

SEQ ID NO: 10175 - protein, 9 aa, Homo sapiens
  REGION 1..9: note = Light chain CDR3
QRTYNAPYT

SEQ ID NO: 10176 - protein, 9 aa, Homo sapiens
  REGION 1..9: note = Light chain CDR3
QQYKSYPYT

SEQ ID NO: 10177 - protein, 9 aa, Homo sapiens
  REGION 1..9: note = Light chain CDR3
QQYGSSPFT

SEQ ID NO: 10178 - protein, 9 aa, Homo sapiens
  REGION 1..9: note = Light chain CDR3
QRTYSAPYT

SEQ ID NO: 10179 - protein, 9 aa, Homo sapiens
  REGION 1..9: note = Light chain CDR3
QQLNNYPYT

SEQ ID NO: 10180 - protein, 9 aa, Homo sapiens
  REGION 1..9: note = Light chain CDR3
QQYGSSPWT

SEQ ID NO: 10181 - protein, 9 aa, Homo sapiens
  REGION 1..9: note = Light chain CDR3
QQYGSSPWT

SEQ ID NO: 10182 - protein, 9 aa, Homo sapiens
  REGION 1..9: note = Light chain CDR3
QQYKSYPYT

SEQ ID NO: 10183 - protein, 9 aa, Homo sapiens
  REGION 1..9: note = Light chain CDR3
QQYNSYPYT

SEQ ID NO: 10184 - protein, 9 aa, Homo sapiens
  REGION 1..9: note = Light chain CDR3
QQYGSSPWT

SEQ ID NO: 10185 - protein, 9 aa, Homo sapiens
  REGION 1..9: note = Light chain CDR3
QQYGSSPFT

SEQ ID NO: 10186 - protein, 9 aa, Homo sapiens
  REGION 1..9: note = Light chain CDR3
QQYKTYPYT

SEQ ID NO: 10187 - protein, 9 aa, Homo sapiens
  REGION 1..9: note = Light chain CDR3
QQYGRSPFT

SEQ ID NO: 10188 - protein, 9 aa, Homo sapiens
  REGION 1..9: note = Light chain CDR3
QRTYSAPYT

SEQ ID NO: 10189 - protein, 9 aa, Homo sapiens
  REGION 1..9: note = Light chain CDR3
QQYGSSPWT

SEQ ID NO: 10190 - protein, 9 aa, Homo sapiens
  REGION 1..9: note = Light chain CDR3
QQYGRSPFT

SEQ ID NO: 10191 - protein, 9 aa, Homo sapiens
  REGION 1..9: note = Light chain CDR3
LRYGTSPFT

SEQ ID NO: 10192 - protein, 9 aa, Homo sapiens
  REGION 1..9: note = Light chain CDR3
QQDYNLPFT

SEQ ID NO: 10193 - protein, 9 aa, Homo sapiens
  REGION 1..9: note = Light chain CDR3
QQYRSYPYT

SEQ ID NO: 10194 - protein, 9 aa, Homo sapiens
  REGION 1..9: note = Light chain CDR3
QQYSRSPWT

SEQ ID NO: 10195 - protein, 9 aa, Homo sapiens
  REGION 1..9: note = Light chain CDR3
QQYGSSPFT

SEQ ID NO: 10196 - protein, 9 aa, Homo sapiens
  REGION 1..9: note = Light chain CDR3
QQYGTSPWT

SEQ ID NO: 10197 - protein, 9 aa, Homo sapiens
  REGION 1..9: note = Light chain CDR3
QQYKSYPYT

SEQ ID NO: 10198 - protein, 9 aa, Homo sapiens
  REGION 1..9: note = Light chain CDR3
QQYKSYPYT

SEQ ID NO: 10199 - protein, 9 aa, Homo sapiens
  REGION 1..9: note = Light chain CDR3
QRTYSAPYT

SEQ ID NO: 10200 - protein, 9 aa, Homo sapiens
  REGION 1..9: note = Light chain CDR3
QQYGSSPFT

SEQ ID NO: 10201 - protein, 9 aa, Homo sapiens
  REGION 1..9: note = Light chain CDR3
QQLNNYPYT

SEQ ID NO: 10202 - protein, 9 aa, Homo sapiens
  REGION 1..9: note = Light chain CDR3
QQYGRSPWT

SEQ ID NO: 10203 - protein, 9 aa, Homo sapiens
  REGION 1..9: note = Light chain CDR3
QQYGSSPWT

SEQ ID NO: 10204 - protein, 9 aa, Homo sapiens
  REGION 1..9: note = Light chain CDR3
QQFGSSPFT

SEQ ID NO: 10205 - protein, 9 aa, Homo sapiens
  REGION 1..9: note = Light chain CDR3
QQYNSYPYT

SEQ ID NO: 10206 - protein, 9 aa, Homo sapiens
  REGION 1..9: note = Light chain CDR3
QQYNSYPYT

SEQ ID NO: 10207 - protein, 9 aa, Homo sapiens
  REGION 1..9: note = Light chain CDR3
QQYKNYPYT

SEQ ID NO: 10208 - protein, 9 aa, Homo sapiens
  REGION 1..9: note = Light chain CDR3
QQYNSYPYT

SEQ ID NO: 10209 - protein, 9 aa, Homo sapiens
  REGION 1..9: note = Light chain CDR3
LQDYNLPFT

SEQ ID NO: 10210 - protein, 9 aa, Homo sapiens
  REGION 1..9: note = Light chain CDR3
QQYKSYPFT

SEQ ID NO: 10211 - protein, 9 aa, Homo sapiens
  REGION 1..9: note = Light chain CDR3
QQYNSYPYT

SEQ ID NO: 10212 - protein, 9 aa, Homo sapiens
  REGION 1..9: note = Light chain CDR3
QQYKSYPYT

SEQ ID NO: 10213 - protein, 9 aa, Homo sapiens
  REGION 1..9: note = Light chain CDR3
QQYKSYPYT

SEQ ID NO: 10214 - protein, 9 aa, Homo sapiens
  REGION 1..9: note = Light chain CDR3
QQYRSYPYT

SEQ ID NO: 10215 - protein, 9 aa, Homo sapiens
  REGION 1..9: note = Light chain CDR3
QQLNNYPYT

SEQ ID NO: 10216 - protein, 9 aa, Homo sapiens
  REGION 1..9: note = Light chain CDR3
QQYKSYPYT

SEQ ID NO: 10217 - protein, 9 aa, Homo sapiens
  REGION 1..9: note = Light chain CDR3
QQDYNLPFT

SEQ ID NO: 10218 - protein, 9 aa, Homo sapiens
  REGION 1..9: note = Light chain CDR3
QQYKSYPYT

SEQ ID NO: 10219 - protein, 9 aa, Homo sapiens
  REGION 1..9: note = Light chain CDR3
QQYGRSPWT

SEQ ID NO: 10220 - protein, 9 aa, Homo sapiens
  REGION 1..9: note = Light chain CDR3
QQDYNLPFT

SEQ ID NO: 10221 - protein, 9 aa, Homo sapiens
  REGION 1..9: note = Light chain CDR3
QQYKSYPYT

SEQ ID NO: 10222 - protein, 9 aa, Homo sapiens
  REGION 1..9: note = Light chain CDR3
QQYGSSPWT

SEQ ID NO: 10223 - protein, 9 aa, Homo sapiens
  REGION 1..9: note = Light chain CDR3
QQYGISPFT

SEQ ID NO: 10224 - protein, 9 aa, Homo sapiens
  REGION 1..9: note = Light chain CDR3
QQFGSSPWT

SEQ ID NO: 10225 - protein, 9 aa, Homo sapiens
  REGION 1..9: note = Light chain CDR3
QQYGSSPFT

SEQ ID NO: 10226 - protein, 9 aa, Homo sapiens
  REGION 1..9: note = Light chain CDR3
QQYGSSPWT

SEQ ID NO: 10227 - protein, 9 aa, Homo sapiens
  REGION 1..9: note = Light chain CDR3
QQYGSSPFT

SEQ ID NO: 10228 - protein, 9 aa, Homo sapiens
  REGION 1..9: note = Light chain CDR3
QQYGNSPFT

SEQ ID NO: 10229 - protein, 9 aa, Homo sapiens
  REGION 1..9: note = Light chain CDR3
MQSLQTPPT

SEQ ID NO: 10230 - protein, 9 aa, Homo sapiens
  REGION 1..9: note = Light chain CDR3
QQYGRSPWT

SEQ ID NO: 10231 - protein, 9 aa, Homo sapiens
  REGION 1..9: note = Light chain CDR3
QQSYSIPLT

SEQ ID NO: 10232 - protein, 9 aa, Homo sapiens
  REGION 1..9: note = Light chain CDR3
MQSLQTPPT

SEQ ID NO: 10233 - protein, 9 aa, Homo sapiens
  REGION 1..9: note = Light chain CDR3
HQSSSLPFT

SEQ ID NO: 10234 - protein, 9 aa, Homo sapiens
  REGION 1..9: note = Light chain CDR3
QQYGISPFT

SEQ ID NO: 10235 - protein, 9 aa, Homo sapiens
  REGION 1..9: note = Light chain CDR3
QLYNSYPFT

SEQ ID NO: 10236 - protein, 9 aa, Homo sapiens
  REGION 1..9: note = Light chain CDR3
QQYGISPFT

SEQ ID NO: 10237 - protein, 9 aa, Homo sapiens
  REGION 1..9: note = Light chain CDR3
QQFGSSPFT

SEQ ID NO: 10238 - protein, 9 aa, Homo sapiens
  REGION 1..9: note = Light chain CDR3
QQYGSSPWT

SEQ ID NO: 10239 - protein, 9 aa, Homo sapiens
  REGION 1..9: note = Light chain CDR3
QQYGSSPFT

SEQ ID NO: 10240 - protein, 9 aa, Homo sapiens
  REGION 1..9: note = Light chain CDR3
QQDYNLPFT

SEQ ID NO: 10241 - protein, 9 aa, Homo sapiens
  REGION 1..9: note = Light chain CDR3
QQYGSSPFT

SEQ ID NO: 10242 - protein, 9 aa, Homo sapiens
  REGION 1..9: note = Light chain CDR3
QQYGSSPWT

SEQ ID NO: 10243 - protein, 9 aa, Homo sapiens
  REGION 1..9: note = Light chain CDR3
QQDYNLPFT

SEQ ID NO: 10244 - protein, 9 aa, Homo sapiens
  REGION 1..9: note = Light chain CDR3
QQYGSSPWT

SEQ ID NO: 10245 - protein, 9 aa, Homo sapiens
  REGION 1..9: note = Light chain CDR3
QHYGSSPWT

SEQ ID NO: 10246 - protein, 9 aa, Homo sapiens
  REGION 1..9: note = Light chain CDR3
QQYGSSPFT

SEQ ID NO: 10247 - protein, 9 aa, Homo sapiens
  REGION 1..9: note = Light chain CDR3
QQYGSSPWT

SEQ ID NO: 10248 - protein, 9 aa, Homo sapiens
  REGION 1..9: note = Light chain CDR3
QQFGSSPWT

SEQ ID NO: 10249 - protein, 9 aa, Homo sapiens
  REGION 1..9: note = Light chain CDR3
QQYGSSPFT

SEQ ID NO: 10250 - protein, 9 aa, Homo sapiens
  REGION 1..9: note = Light chain CDR3
QQYGSSPWA

SEQ ID NO: 10251 - protein, 9 aa, Homo sapiens
  REGION 1..9: note = Light chain CDR3
QQYGISPFT

SEQ ID NO: 10252 - protein, 9 aa, Homo sapiens
  REGION 1..9: note = Light chain CDR3
QQYGISPFT

SEQ ID NO: 10253 - protein, 9 aa, Homo sapiens
  REGION 1..9: note = Light chain CDR3
QQYGSSPFT

SEQ ID NO: 10254 - protein, 9 aa, Homo sapiens
  REGION 1..9: note = Light chain CDR3
QQLGSSPFT

SEQ ID NO: 10255 - protein, 9 aa, Homo sapiens
  REGION 1..9: note = Light chain CDR3
QQYGSSPFT

SEQ ID NO: 10256 - protein, 9 aa, Homo sapiens
  REGION 1..9: note = Light chain CDR3
MQALQTPLT

SEQ ID NO: 10257 - protein, 9 aa, Homo sapiens
  REGION 1..9: note = Light chain CDR3
QQYGSSPWT

SEQ ID NO: 10258 - protein, 9 aa, Homo sapiens
  REGION 1..9: note = Light chain CDR3
QQYGSSPWT

SEQ ID NO: 10259 - protein, 9 aa, Homo sapiens
  REGION 1..9: note = Light chain CDR3
QQYGSSPWT

SEQ ID NO: 10260 - protein, 9 aa, Homo sapiens
  REGION 1..9: note = Light chain CDR3
QQYGSSPFT

SEQ ID NO: 10261 - protein, 9 aa, Homo sapiens
  REGION 1..9: note = Light chain CDR3
QQYGSSPFT

SEQ ID NO: 10262 - protein, 9 aa, Homo sapiens
  REGION 1..9: note = Light chain CDR3
QQYGISPFT

SEQ ID NO: 10263 - protein, 9 aa, Homo sapiens
  REGION 1..9: note = Light chain CDR3
QQYGSSPWT

SEQ ID NO: 10264 - protein, 9 aa, Homo sapiens
  REGION 1..9: note = Light chain CDR3
QQYGSSPWT

SEQ ID NO: 10265 - protein, 9 aa, Homo sapiens
  REGION 1..9: note = Light chain CDR3
QHYGSSPWT

SEQ ID NO: 10266 - protein, 9 aa, Homo sapiens
  REGION 1..9: note = Light chain CDR3
QQYGSSPFT

SEQ ID NO: 10267 - protein, 9 aa, Homo sapiens
  REGION 1..9: note = Light chain CDR3
QHYGSSPWT

SEQ ID NO: 10268 - protein, 9 aa, Homo sapiens
  REGION 1..9: note = Light chain CDR3
QQYGSSPFT

SEQ ID NO: 10269 - protein, 9 aa, Homo sapiens
  REGION 1..9: note = Light chain CDR3
QQYGSSPFT

SEQ ID NO: 10270 - protein, 9 aa, Homo sapiens
  REGION 1..9: note = Light chain CDR3
QQYGSSPFT

SEQ ID NO: 10271 - protein, 9 aa, Homo sapiens
  REGION 1..9: note = Light chain CDR3
QQYGISPFT

SEQ ID NO: 10272 - protein, 9 aa, Homo sapiens
  REGION 1..9: note = Light chain CDR3
QQYGTSPFT

SEQ ID NO: 10273 - protein, 9 aa, Homo sapiens
  REGION 1..9: note = Light chain CDR3
QQYGSSPFT

SEQ ID NO: 10274 - protein, 9 aa, Homo sapiens
  REGION 1..9: note = Light chain CDR3
QQYGSSPFT

SEQ ID NO: 10275 - protein, 9 aa, Homo sapiens
  REGION 1..9: note = Light chain CDR3
QQYGSSPFT

SEQ ID NO: 10276 - protein, 9 aa, Homo sapiens
  REGION 1..9: note = Light chain CDR3
QQYGTSPFT

SEQ ID NO: 10277 - protein, 9 aa, Homo sapiens
  REGION 1..9: note = Light chain CDR3
QQYGSSPFT

SEQ ID NO: 10278 - protein, 9 aa, Homo sapiens
  REGION 1..9: note = Light chain CDR3
QQYGSSPFT

SEQ ID NO: 10279 - protein, 9 aa, Homo sapiens
  REGION 1..9: note = Light chain CDR3
QQYGSSPWT

SEQ ID NO: 10280 - protein, 9 aa, Homo sapiens
  REGION 1..9: note = Light chain CDR3
QQYGSSPFT

SEQ ID NO: 10281 - protein, 9 aa, Homo sapiens
  REGION 1..9: note = Light chain CDR3
QQYGRSPFT

SEQ ID NO: 10282 - protein, 9 aa, Homo sapiens
  REGION 1..9: note = Light chain CDR3
QQYGSSPFT

SEQ ID NO: 10283 - protein, 9 aa, Homo sapiens
  REGION 1..9: note = Light chain CDR3
QQYGSSPFT

SEQ ID NO: 10284 - protein, 9 aa, Homo sapiens
  REGION 1..9: note = Light chain CDR3
QQYGSSPFT

SEQ ID NO: 10285 - protein, 9 aa, Homo sapiens
  REGION 1..9: note = Light chain CDR3
QQYGSSPWT

SEQ ID NO: 10286 - protein, 9 aa, Homo sapiens
  REGION 1..9: note = Light chain CDR3
QQFGSSPFT

SEQ ID NO: 10287 - protein, 9 aa, Homo sapiens
  REGION 1..9: note = Light chain CDR3
QQYGSSPFT

SEQ ID NO: 10288 - protein, 9 aa, Homo sapiens
  REGION 1..9: note = Light chain CDR3
QQSYSTPLT

SEQ ID NO: 10289 - protein, 9 aa, Homo sapiens
  REGION 1..9: note = Light chain CDR3
QQYGSSPFT

SEQ ID NO: 10290 - protein, 9 aa, Homo sapiens
  REGION 1..9: note = Light chain CDR3
QQYNSYPYT

SEQ ID NO: 10291 - protein, 9 aa, Homo sapiens
  REGION 1..9: note = Light chain CDR3
QQYGTSPWT

SEQ ID NO: 10292 - protein, 9 aa, Homo sapiens
  REGION 1..9: note = Light chain CDR3
HQDYNLPYT

SEQ ID NO: 10293 - protein, 9 aa, Homo sapiens
  REGION 1..9: note = Light chain CDR3
QQYGSSPWT

SEQ ID NO: 10294 - protein, 9 aa, Homo sapiens
  REGION 1..9: note = Light chain CDR3
QQYGSSPFT

SEQ ID NO: 10295 - protein, 9 aa, Homo sapiens
  REGION 1..9: note = Light chain CDR3
QQYGSSPFT

SEQ ID NO: 10296 - protein, 9 aa, Homo sapiens
  REGION 1..9: note = Light chain CDR3
QQSYSTPLT

SEQ ID NO: 10297 - protein, 9 aa, Homo sapiens
  REGION 1..9: note = Light chain CDR3
QQYGISPFT

SEQ ID NO: 10298 - protein, 9 aa, Homo sapiens
  REGION 1..9: note = Light chain CDR3
QHYGSSPWT

SEQ ID NO: 10299 - protein, 9 aa, Homo sapiens
  REGION 1..9: note = Light chain CDR3
HQYYSTPYT

SEQ ID NO: 10300 - protein, 9 aa, Homo sapiens
  REGION 1..9: note = Light chain CDR3
QQDYNLPYT

SEQ ID NO: 10301 - protein, 9 aa, Homo sapiens
  REGION 1..9: note = Light chain CDR3
QQYCSTPYT

SEQ ID NO: 10302 - protein, 8 aa, Homo sapiens
  REGION 1..8: note = Light chain CDR3
HQSSSLPT

SEQ ID NO: 10303 - protein, 9 aa, Homo sapiens
  REGION 1..9: note = Light chain CDR3
MQALQTPIT

SEQ ID NO: 10304 - protein, 8 aa, Homo sapiens
  REGION 1..8: note = Light chain CDR3
MQSLQTIT

SEQ ID NO: 10305 - protein, 9 aa, Homo sapiens
  REGION 1..9: note = Light chain CDR3
QQYGSSPWT

SEQ ID NO: 10306 - protein, 9 aa, Homo sapiens
  REGION 1..9: note = Light chain CDR3
QKYNSAPWT

SEQ ID NO: 10307 - protein, 9 aa, Homo sapiens
  REGION 1..9: note = Light chain CDR3
QQYGSSPFT

SEQ ID NO: 10308 - protein, 9 aa, Homo sapiens
  REGION 1..9: note = Light chain CDR3
QHVYHLPWT

SEQ ID NO: 10309 - protein, 9 aa, Homo sapiens
  REGION 1..9: note = Light chain CDR3
QQYGSSPFT

SEQ ID NO: 10310 - protein, 9 aa, Homo sapiens
  REGION 1..9: note = Light chain CDR3
QQYGSSPFT

SEQ ID NO: 10311 - protein, 9 aa, Homo sapiens
  REGION 1..9: note = Light chain CDR3
QQYGSSPWT

SEQ ID NO: 10312 - protein, 9 aa, Homo sapiens
  REGION 1..9: note = Light chain CDR3
QQDYNLPLT

SEQ ID NO: 10313 - protein, 9 aa, Homo sapiens
  REGION 1..9: note = Light chain CDR3
QQYGSSPFT

SEQ ID NO: 10314 - protein, 9 aa, Homo sapiens
  REGION 1..9: note = Light chain CDR3
QQYGSSPFT

SEQ ID NO: 10315 - protein, 9 aa, Homo sapiens
  REGION 1..9: note = Light chain CDR3
QQAYNLPYT

SEQ ID NO: 10316 - protein, 9 aa, Homo sapiens
  REGION 1..9: note = Light chain CDR3
QQSYSTPLT

SEQ ID NO: 10317 - protein, 9 aa, Homo sapiens
  REGION 1..9: note = Light chain CDR3
QQYGSSPFT

SEQ ID NO: 10318 - protein, 9 aa, Homo sapiens
  REGION 1..9: note = Light chain CDR3
QQDYNLPFT

SEQ ID NO: 10319 - protein, 9 aa, Homo sapiens
  REGION 1..9: note = Light chain CDR3
QQYGSSPFT

SEQ ID NO: 10320 - protein, 9 aa, Homo sapiens
  REGION 1..9: note = Light chain CDR3
QQYGSSPFT

SEQ ID NO: 10321 - protein, 9 aa, Homo sapiens
  REGION 1..9: note = Light chain CDR3
LQHNSYPFT

SEQ ID NO: 10322 - protein, 9 aa, Homo sapiens
  REGION 1..9: note = Light chain CDR3
QQYGSSPFT

SEQ ID NO: 10323 - protein, 9 aa, Homo sapiens
  REGION 1..9: note = Light chain CDR3
QQYGISPFT

SEQ ID NO: 10324 - protein, 9 aa, Homo sapiens
  REGION 1..9: note = Light chain CDR3
QQYGTSPWT

SEQ ID NO: 10325 - protein, 9 aa, Homo sapiens
  REGION 1..9: note = Light chain CDR3
QQYGISPFT

SEQ ID NO: 10326 - protein, 9 aa, Homo sapiens
  REGION 1..9: note = Light chain CDR3
QQYGSSPFT

SEQ ID NO: 10327 - protein, 9 aa, Homo sapiens
  REGION 1..9: note = Light chain CDR3
QQDYKLPYT

SEQ ID NO: 10328 - protein, 9 aa, Homo sapiens
  REGION 1..9: note = Light chain CDR3
QQYGSSLWT

SEQ ID NO: 10329 - protein, 9 aa, Homo sapiens
  REGION 1..9: note = Light chain CDR3
QQYGTSPFT

SEQ ID NO: 10330 - protein, 9 aa, Homo sapiens
  REGION 1..9: note = Light chain CDR3
QQYGRSPFT

SEQ ID NO: 10331 - protein, 9 aa, Homo sapiens
  REGION 1..9: note = Light chain CDR3
QQYGSSPWT

SEQ ID NO: 10332 - protein, 9 aa, Homo sapiens
  REGION 1..9: note = Light chain CDR3
QQDYNLPFT

SEQ ID NO: 10333 - protein, 9 aa, Homo sapiens
  REGION 1..9: note = Light chain CDR3
QQYGVSPFT

SEQ ID NO: 10334 - protein, 9 aa, Homo sapiens
  REGION 1..9: note = Light chain CDR3
QQYGISPFT

SEQ ID NO: 10335 - protein, 9 aa, Homo sapiens
  REGION 1..9: note = Light chain CDR3
QQYGISPFT

SEQ ID NO: 10336 - protein, 9 aa, Homo sapiens
  REGION 1..9: note = Light chain CDR3
QQYGSSPFT

SEQ ID NO: 10337 - protein, 9 aa, Homo sapiens
  REGION 1..9: note = Light chain CDR3
QQYGTSPFT

SEQ ID NO: 10338 - protein, 9 aa, Homo sapiens
  REGION 1..9: note = Light chain CDR3
QQYGSSPFT

SEQ ID NO: 10339 - protein, 9 aa, Homo sapiens
  REGION 1..9: note = Light chain CDR3
QQYGSSPFT

SEQ ID NO: 10340 - protein, 9 aa, Homo sapiens
  REGION 1..9: note = Light chain CDR3
QQYGSSPFT

SEQ ID NO: 10341 - protein, 9 aa, Homo sapiens
  REGION 1..9: note = Light chain CDR3
QHYGSSPWT

SEQ ID NO: 10342 - protein, 9 aa, Homo sapiens
  REGION 1..9: note = Light chain CDR3
QQYGSSPFT

SEQ ID NO: 10343 - protein, 9 aa, Homo sapiens
  REGION 1..9: note = Light chain CDR3
QQYGTSPFT

SEQ ID NO: 10344 - protein, 9 aa, Homo sapiens
  REGION 1..9: note = Light chain CDR3
QQYGSSPFT

SEQ ID NO: 10345 - protein, 9 aa, Homo sapiens
  REGION 1..9: note = Light chain CDR3
MQTLQTPPT

SEQ ID NO: 10346 - protein, 9 aa, Homo sapiens
  REGION 1..9: note = Light chain CDR3
QQYGSSPFT

SEQ ID NO: 10347 - protein, 9 aa, Homo sapiens
  REGION 1..9: note = Light chain CDR3
QQYGISPFT

SEQ ID NO: 10348 - protein, 9 aa, Homo sapiens
  REGION 1..9: note = Light chain CDR3
QQYGSSPFT

SEQ ID NO: 10349 - protein, 9 aa, Homo sapiens
  REGION 1..9: note = Light chain CDR3
QQYGISPFT

SEQ ID NO: 10350 - protein, 9 aa, Homo sapiens
  REGION 1..9: note = Light chain CDR3
QQYGTSPFT

SEQ ID NO: 10351 - protein, 9 aa, Homo sapiens
  REGION 1..9: note = Light chain CDR3
QQYGISPFT

SEQ ID NO: 10352 - protein, 9 aa, Homo sapiens
  REGION 1..9: note = Light chain CDR3
QQYGISPFT

SEQ ID NO: 10353 - protein, 9 aa, Homo sapiens
  REGION 1..9: note = Light chain CDR3
QQYGTSPFT

SEQ ID NO: 10354 - protein, 9 aa, Homo sapiens
  REGION 1..9: note = Light chain CDR3
QQYGISPFT

SEQ ID NO: 10355 - protein, 9 aa, Homo sapiens
  REGION 1..9: note = Light chain CDR3
QQYGSSPFT

SEQ ID NO: 10356 - protein, 9 aa, Homo sapiens
  REGION 1..9: note = Light chain CDR3
QQYGISPFT

SEQ ID NO: 10357 - protein, 9 aa, Homo sapiens
  REGION 1..9: note = Light chain CDR3
QQYGISPFT

SEQ ID NO: 10358 - protein, 9 aa, Homo sapiens
  REGION 1..9: note = Light chain CDR3
QQYGSSPFT

SEQ ID NO: 10359 - protein, 9 aa, Homo sapiens
  REGION 1..9: note = Light chain CDR3
QQYGRSPFT

SEQ ID NO: 10360 - protein, 9 aa, Homo sapiens
  REGION 1..9: note = Light chain CDR3
QQYGSSPFT

SEQ ID NO: 10361 - protein, 9 aa, Homo sapiens
  REGION 1..9: note = Light chain CDR3
QQYGSSPWT

SEQ ID NO: 10362 - protein, 9 aa, Homo sapiens
  REGION 1..9: note = Light chain CDR3
HQSSSLPFT

SEQ ID NO: 10363 - protein, 9 aa, Homo sapiens
  REGION 1..9: note = Light chain CDR3
QQYGSSPFT

SEQ ID NO: 10364 - protein, 9 aa, Homo sapiens
  REGION 1..9: note = Light chain CDR3
LQHNSYPLT

SEQ ID NO: 10365 - protein, 9 aa, Homo sapiens
  REGION 1..9: note = Light chain CDR3
QQYGSSPFT

SEQ ID NO: 10366 - protein, 9 aa, Homo sapiens
  REGION 1..9: note = Light chain CDR3
QQYGSSPFT

SEQ ID NO: 10367 - protein, 9 aa, Homo sapiens
  REGION 1..9: note = Light chain CDR3
QQYGSSPWT

SEQ ID NO: 10368 - protein, 9 aa, Homo sapiens
  REGION 1..9: note = Light chain CDR3
QQYGRSPWT

SEQ ID NO: 10369 - protein, 9 aa, Homo sapiens
  REGION 1..9: note = Light chain CDR3
LQHNSYPLT

SEQ ID NO: 10370 - protein, 9 aa, Homo sapiens
  REGION 1..9: note = Light chain CDR3
QQYGSSPWT

SEQ ID NO: 10371 - protein, 9 aa, Homo sapiens
  REGION 1..9: note = Light chain CDR3
QQYGSSPFT

SEQ ID NO: 10372 - protein, 9 aa, Homo sapiens
  REGION 1..9: note = Light chain CDR3
QQYGGSPWT

SEQ ID NO: 10373 - protein, 9 aa, Homo sapiens
  REGION 1..9: note = Light chain CDR3
QQYGSSPFT

SEQ ID NO: 10374 - protein, 9 aa, Homo sapiens
  REGION 1..9: note = Light chain CDR3
QQYGSSPWT

SEQ ID NO: 10375 - protein, 9 aa, Homo sapiens
  REGION 1..9: note = Light chain CDR3
QQYGSSPWT

SEQ ID NO: 10376 - protein, 9 aa, Homo sapiens
  REGION 1..9: note = Light chain CDR3
QQSYSTPFT

SEQ ID NO: 10377 - protein, 9 aa, Homo sapiens
  REGION 1..9: note = Light chain CDR3
MQGTHWPIT

SEQ ID NO: 10378 - protein, 9 aa, Homo sapiens
  REGION 1..9: note = Light chain CDR3
QQYGPSPWT

SEQ ID NO: 10379 - protein, 9 aa, Homo sapiens
  REGION 1..9: note = Light chain CDR3
QQYGSSPFT

SEQ ID NO: 10380 - protein, 9 aa, Homo sapiens
  REGION 1..9: note = Light chain CDR3
MQTLQTPLT

SEQ ID NO: 10381 - protein, 9 aa, Homo sapiens
  REGION 1..9: note = Light chain CDR3
QQYGTSPWT

SEQ ID NO: 10382 - protein, 9 aa, Homo sapiens
  REGION 1..9: note = Light chain CDR3
QQSYRTPFT

SEQ ID NO: 10383 - protein, 9 aa, Homo sapiens
  REGION 1..9: note = Light chain CDR3
QQYGSSPWT

SEQ ID NO: 10384 - protein, 9 aa, Homo sapiens
  REGION 1..9: note = Light chain CDR3
QKYNSAPFT

SEQ ID NO: 10385 - protein, 9 aa, Homo sapiens
  REGION 1..9: note = Light chain CDR3
QQSYSTPFT

SEQ ID NO: 10386 - protein, 9 aa, Homo sapiens
  REGION 1..9: note = Light chain CDR3
QHYGSSPFT

SEQ ID NO: 10387 - protein, 9 aa, Homo sapiens
  REGION 1..9: note = Light chain CDR3
QKYNSAPYT

SEQ ID NO: 10388 - protein, 9 aa, Homo sapiens
  REGION 1..9: note = Light chain CDR3
QQSYRTPFT

SEQ ID NO: 10389 - protein, 9 aa, Homo sapiens
  REGION 1..9: note = Light chain CDR3
QQYGRSPFT

SEQ ID NO: 10390 - protein, 9 aa, Homo sapiens
  REGION 1..9: note = Light chain CDR3
QQSYSTPFT

SEQ ID NO: 10391 - protein, 9 aa, Homo sapiens
  REGION 1..9: note = Light chain CDR3
QQYGSSPWT

SEQ ID NO: 10392 - protein, 9 aa, Homo sapiens
  REGION 1..9: note = Light chain CDR3
QQYGSSPWT

SEQ ID NO: 10393 - protein, 9 aa, Homo sapiens
  REGION 1..9: note = Light chain CDR3
QKYNSAPLT

SEQ ID NO: 10394 - protein, 9 aa, Homo sapiens
  REGION 1..9: note = Light chain CDR3
QQYGRSPFT

SEQ ID NO: 10395 - protein, 9 aa, Homo sapiens
  REGION 1..9: note = Light chain CDR3
QQDYNLPFT

SEQ ID NO: 10396 - protein, 9 aa, Homo sapiens
  REGION 1..9: note = Light chain CDR3
QQYGTSPFT

SEQ ID NO: 10397 - protein, 9 aa, Homo sapiens
  REGION 1..9: note = Light chain CDR3
QQYGTSPFT

SEQ ID NO: 10398 - protein, 9 aa, Homo sapiens
  REGION 1..9: note = Light chain CDR3
QQYGSSPWT

SEQ ID NO: 10399 - protein, 9 aa, Homo sapiens
  REGION 1..9: note = Light chain CDR3
QQYGSSPFT

SEQ ID NO: 10400 - protein, 9 aa, Homo sapiens
  REGION 1..9: note = Light chain CDR3
QQLNSYPPT

SEQ ID NO: 10401 - protein, 9 aa, Homo sapiens
  REGION 1..9: note = Light chain CDR3
QQYGSSPFT

SEQ ID NO: 10402 - protein, 9 aa, Homo sapiens
  REGION 1..9: note = Light chain CDR3
HQSSSLPFT

SEQ ID NO: 10403 - protein, 9 aa, Homo sapiens
  REGION 1..9: note = Light chain CDR3
QQSYSTPFT

SEQ ID NO: 10404 - protein, 9 aa, Homo sapiens
  REGION 1..9: note = Light chain CDR3
QVYNSAPYT

SEQ ID NO: 10405 - protein, 9 aa, Homo sapiens
  REGION 1..9: note = Light chain CDR3
QQGYNLPFT

SEQ ID NO: 10406 - protein, 9 aa, Homo sapiens
  REGION 1..9: note = Light chain CDR3
QQYGSSPFT

SEQ ID NO: 10407 - protein, 10 aa, Homo sapiens
  REGION 1..10: note = Light chain CDR3
QKYNSAPPLT

SEQ ID NO: 10408 - protein, 9 aa, Homo sapiens
  REGION 1..9: note = Light chain CDR3
QQVYNLPWT

SEQ ID NO: 10409 - protein, 9 aa, Homo sapiens
  REGION 1..9: note = Light chain CDR3
QQDYNLPFT

SEQ ID NO: 10410 - protein, 9 aa, Homo sapiens
  REGION 1..9: note = Light chain CDR3
QQYGRSPFT

SEQ ID NO: 10411 - protein, 9 aa, Homo sapiens
  REGION 1..9: note = Light chain CDR3
QQYGRSPFT

SEQ ID NO: 10412 - protein, 9 aa, Homo sapiens
  REGION 1..9: note = Light chain CDR3
QQYGSSPFT

SEQ ID NO: 10413 - protein, 9 aa, Homo sapiens
  REGION 1..9: note = Light chain CDR3
QQYGRSPFT

SEQ ID NO: 10414 - protein, 9 aa, Homo sapiens
  REGION 1..9: note = Light chain CDR3
QQYGTSPYT

SEQ ID NO: 10415 - protein, 9 aa, Homo sapiens
  REGION 1..9: note = Light chain CDR3
QQSYRTPFT

SEQ ID NO: 10416 - protein, 9 aa, Homo sapiens
  REGION 1..9: note = Light chain CDR3
QQYGSSPWT

SEQ ID NO: 10417 - protein, 9 aa, Homo sapiens
  REGION 1..9: note = Light chain CDR3
QQYGSSPWT

SEQ ID NO: 10418 - protein, 9 aa, Homo sapiens
  REGION 1..9: note = Light chain CDR3
QQYGSSPWT

SEQ ID NO: 10419 - protein, 9 aa, Homo sapiens
  REGION 1..9: note = Light chain CDR3
QQDYNLPFT

SEQ ID NO: 10420 - protein, 9 aa, Homo sapiens
  REGION 1..9: note = Light chain CDR3
QQYGSSPFT

SEQ ID NO: 10421 - protein, 9 aa, Homo sapiens
  REGION 1..9: note = Light chain CDR3
QQDYNLPFT

SEQ ID NO: 10422 - protein, 9 aa, Homo sapiens
  REGION 1..9: note = Light chain CDR3
QEYSSAPWT

SEQ ID NO: 10423 - protein, 9 aa, Homo sapiens
  REGION 1..9: note = Light chain CDR3
QQYGSSPWT

SEQ ID NO: 10424 - protein, 9 aa, Homo sapiens
  REGION 1..9: note = Light chain CDR3
QQVYNLPFT

SEQ ID NO: 10425 - protein, 9 aa, Homo sapiens
  REGION 1..9: note = Light chain CDR3
QKYGSSPFT

SEQ ID NO: 10426 - protein, 10 aa, Homo sapiens
  REGION 1..10: note = Light chain CDR3
QQRSNWPPYT

SEQ ID NO: 10427 - protein, 9 aa, Homo sapiens
  REGION 1..9: note = Light chain CDR3
QQYGSSPFT

SEQ ID NO: 10428 - protein, 9 aa, Homo sapiens
  REGION 1..9: note = Light chain CDR3
QQYGSSPFT

SEQ ID NO: 10429 - protein, 9 aa, Homo sapiens
  REGION 1..9: note = Light chain CDR3
QQYGSSPFT

SEQ ID NO: 10430 - protein, 9 aa, Homo sapiens
  REGION 1..9: note = Light chain CDR3
QQYGSSPFT

SEQ ID NO: 10431 - protein, 9 aa, Homo sapiens
  REGION 1..9: note = Light chain CDR3
QQYGSSPWT

SEQ ID NO: 10432 - protein, 9 aa, Homo sapiens
  REGION 1..9: note = Light chain CDR3
HQDYNLPYT

SEQ ID NO: 10433 - protein, 9 aa, Homo sapiens
  REGION 1..9: note = Light chain CDR3
QQYGSSPWT

SEQ ID NO: 10434 - protein, 9 aa, Homo sapiens
  REGION 1..9: note = Light chain CDR3
QQYGSSPFT

SEQ ID NO: 10435 - protein, 9 aa, Homo sapiens
  REGION 1..9: note = Light chain CDR3
QQYGRSPFT

SEQ ID NO: 10436 - protein, 9 aa, Homo sapiens
  REGION 1..9: note = Light chain CDR3
QQYGSSPWT

SEQ ID NO: 10437 - protein, 9 aa, Homo sapiens
  REGION 1..9: note = Light chain CDR3
QQYGSSPFT

SEQ ID NO: 10438 - protein, 9 aa, Homo sapiens
  REGION 1..9: note = Light chain CDR3
QNYNSAPWT

SEQ ID NO: 10439 - protein, 9 aa, Homo sapiens
  REGION 1..9: note = Light chain CDR3
QQYGRSPWT

SEQ ID NO: 10440 - protein, 9 aa, Homo sapiens
  REGION 1..9: note = Light chain CDR3
QHYGSSPFT

SEQ ID NO: 10441 - protein, 9 aa, Homo sapiens
  REGION 1..9: note = Light chain CDR3
MQTLQTPLT

SEQ ID NO: 10442 - protein, 9 aa, Homo sapiens
  REGION 1..9: note = Light chain CDR3
QQYGTSPFT

SEQ ID NO: 10443 - protein, 9 aa, Homo sapiens
  REGION 1..9: note = Light chain CDR3
QQYGRSPWT

SEQ ID NO: 10444 - protein, 10 aa, Homo sapiens
  REGION 1..10: note = Light chain CDR3
QQYGSSSMYT

SEQ ID NO: 10445 - protein, 10 aa, Homo sapiens
  REGION 1..10: note = Light chain CDR3
QQYGSSTMYT

SEQ ID NO: 10446 - protein, 9 aa, Homo sapiens
  REGION 1..9: note = Light chain CDR3
QKYNSAPYT

SEQ ID NO: 10447 - protein, 9 aa, Homo sapiens
  REGION 1..9: note = Light chain CDR3
QQYGTSPFT

SEQ ID NO: 10448 - protein, 9 aa, Homo sapiens
  REGION 1..9: note = Light chain CDR3
QQYGSSPWT

SEQ ID NO: 10449 - protein, 9 aa, Homo sapiens
  REGION 1..9: note = Light chain CDR3
QQYGSSPWT

SEQ ID NO: 10450 - protein, 9 aa, Homo sapiens
  REGION 1..9: note = Light chain CDR3
QQYGSSPWT

SEQ ID NO: 10451 - protein, 9 aa, Homo sapiens
  REGION 1..9: note = Light chain CDR3
QQYGSSPWT

SEQ ID NO: 10452 - protein, 9 aa, Homo sapiens
  REGION 1..9: note = Light chain CDR3
QQYGTSPWT

SEQ ID NO: 10453 - protein, 9 aa, Homo sapiens
  REGION 1..9: note = Light chain CDR3
QQYGSSPFT

SEQ ID NO: 10454 - protein, 9 aa, Homo sapiens
  REGION 1..9: note = Light chain CDR3
QQYGSSPWT

SEQ ID NO: 10455 - protein, 9 aa, Homo sapiens
  REGION 1..9: note = Light chain CDR3
QQYGSSPWT

SEQ ID NO: 10456 - protein, 9 aa, Homo sapiens
  REGION 1..9: note = Light chain CDR3
QHYGSSPFT

SEQ ID NO: 10457 - protein, 10 aa, Homo sapiens
  REGION 1..10: note = Light chain CDR3
QQRSNWPPYT

SEQ ID NO: 10458 - protein, 9 aa, Homo sapiens
  REGION 1..9: note = Light chain CDR3
QQYGSSPWT

SEQ ID NO: 10459 - protein, 9 aa, Homo sapiens
  REGION 1..9: note = Light chain CDR3
QQYGSSPFT

SEQ ID NO: 10460 - protein, 9 aa, Homo sapiens
  REGION 1..9: note = Light chain CDR3
QQYGSSPWT

SEQ ID NO: 10461 - protein, 9 aa, Homo sapiens
  REGION 1..9: note = Light chain CDR3
QQSYTTPLT

SEQ ID NO: 10462 - protein, 9 aa, Homo sapiens
  REGION 1..9: note = Light chain CDR3
QQYGSSPWT

SEQ ID NO: 10463 - protein, 9 aa, Homo sapiens
  REGION 1..9: note = Light chain CDR3
QQYGTSPWT

SEQ ID NO: 10464 - protein, 9 aa, Homo sapiens
  REGION 1..9: note = Light chain CDR3
QQYGRSPFT

SEQ ID NO: 10465 - protein, 9 aa, Homo sapiens
  REGION 1..9: note = Light chain CDR3
QQYGNSPWT

SEQ ID NO: 10466 - protein, 9 aa, Homo sapiens
  REGION 1..9: note = Light chain CDR3
QQYGSSPWT

SEQ ID NO: 10467 - protein, 9 aa, Homo sapiens
  REGION 1..9: note = Light chain CDR3
QQYGSSPWT

SEQ ID NO: 10468 - protein, 9 aa, Homo sapiens
  REGION 1..9: note = Light chain CDR3
QQYGTSPFT

SEQ ID NO: 10469 - protein, 9 aa, Homo sapiens
  REGION 1..9: note = Light chain CDR3
QQYGSSPFT

SEQ ID NO: 10470 - protein, 9 aa, Homo sapiens
  REGION 1..9: note = Light chain CDR3
QHYGSSPFT

SEQ ID NO: 10471 - protein, 9 aa, Homo sapiens
  REGION 1..9: note = Light chain CDR3
QQDYNLPLT

SEQ ID NO: 10472 - protein, 9 aa, Homo sapiens
  REGION 1..9: note = Light chain CDR3
QQYGRSPFT

SEQ ID NO: 10473 - protein, 9 aa, Homo sapiens
  REGION 1..9: note = Light chain CDR3
QQYGRSPFT

SEQ ID NO: 10474 - protein, 9 aa, Homo sapiens
  REGION 1..9: note = Light chain CDR3
QQYGSSPWT

SEQ ID NO: 10475 - protein, 9 aa, Homo sapiens
  REGION 1..9: note = Light chain CDR3
QQYGRSPFT

SEQ ID NO: 10476 - protein, 9 aa, Homo sapiens
  REGION 1..9: note = Light chain CDR3
QHYGSSPWT

SEQ ID NO: 10477 - protein, 9 aa, Homo sapiens
  REGION 1..9: note = Light chain CDR3
QQYGTSPFT

SEQ ID NO: 10478 - protein, 9 aa, Homo sapiens
  REGION 1..9: note = Light chain CDR3
QQYGRSPFT

SEQ ID NO: 10479 - protein, 9 aa, Homo sapiens
  REGION 1..9: note = Light chain CDR3
QQYGRSPWT

SEQ ID NO: 10480 - protein, 8 aa, Homo sapiens
  REGION 1..8: note = Heavy chain CDR1
GGSISSYY

SEQ ID NO: 10481 - protein, 10 aa, Homo sapiens
  REGION 1..10: note = Heavy chain CDR1
GGSISSSSYY

SEQ ID NO: 10482 - protein, 10 aa, Homo sapiens
  REGION 1..10: note = Heavy chain CDR1
GGSISSSSYY

SEQ ID NO: 10483 - protein, 10 aa, Homo sapiens
  REGION 1..10: note = Heavy chain CDR1
GGSISSSSYY

SEQ ID NO: 10484 - protein, 8 aa, Homo sapiens
  REGION 1..8: note = Heavy chain CDR1
GFTFSDYY

SEQ ID NO: 10485 - protein, 10 aa, Homo sapiens
  REGION 1..10: note = Heavy chain CDR1
GGSISSSSYY

SEQ ID NO: 10486 - protein, 10 aa, Homo sapiens
  REGION 1..10: note = Heavy chain CDR1
GGSISSSSYY

SEQ ID NO: 10487 - protein, 8 aa, Homo sapiens
  REGION 1..8: note = Heavy chain CDR1
GGSISSYY

SEQ ID NO: 10488 - protein, 8 aa, Homo sapiens
  REGION 1..8: note = Heavy chain CDR1
GFTFSNAW

SEQ ID NO: 10489 - protein, 8 aa, Homo sapiens
  REGION 1..8: note = Heavy chain CDR1
GYTFTSYG

SEQ ID NO: 10490 - protein, 10 aa, Homo sapiens
  REGION 1..10: note = Heavy chain CDR1
GGSISSSSYY

SEQ ID NO: 10491 - protein, 8 aa, Homo sapiens
  REGION 1..8: note = Heavy chain CDR1
GFTFDDYG

SEQ ID NO: 10492 - protein, 10 aa, Homo sapiens
  REGION 1..10: note = Heavy chain CDR1
GGSISSSSYY

SEQ ID NO: 10493 - protein, 8 aa, Homo sapiens
  REGION 1..8: note = Heavy chain CDR1
GFTFDDYG

SEQ ID NO: 10494 - protein, 10 aa, Homo sapiens
  REGION 1..10: note = Heavy chain CDR1
GGSISSSSYY

SEQ ID NO: 10495 - protein, 10 aa, Homo sapiens
  REGION 1..10: note = Heavy chain CDR1
GGSISSSSYY

SEQ ID NO: 10496 - protein, 8 aa, Homo sapiens
  REGION 1..8: note = Heavy chain CDR1
GFTFSSYG

SEQ ID NO: 10497 - protein, 8 aa, Homo sapiens
  REGION 1..8: note = Heavy chain CDR1
GFTFSNAW

SEQ ID NO: 10498 - protein, 10 aa, Homo sapiens
  REGION 1..10: note = Heavy chain CDR1
GGSISSSSYY

SEQ ID NO: 10499 - protein, 8 aa, Homo sapiens
  REGION 1..8: note = Heavy chain CDR1
GGSISSYY

SEQ ID NO: 10500 - protein, 8 aa, Homo sapiens
  REGION 1..8: note = Heavy chain CDR1
GGSISSYY

SEQ ID NO: 10501 - protein, 8 aa, Homo sapiens
  REGION 1..8: note = Heavy chain CDR1
GYTFTSYG

SEQ ID NO: 10502 - protein, 8 aa, Homo sapiens
  REGION 1..8: note = Heavy chain CDR1
GFTFSNAW

SEQ ID NO: 10503 - protein, 8 aa, Homo sapiens
  REGION 1..8: note = Heavy chain CDR1
GGSISSYY

SEQ ID NO: 10504 - protein, 8 aa, Homo sapiens
  REGION 1..8: note = Heavy chain CDR1
GYTFTSYG

SEQ ID NO: 10505 - protein, 8 aa, Homo sapiens
  REGION 1..8: note = Heavy chain CDR1
GGSISSYY

SEQ ID NO: 10506 - protein, 8 aa, Homo sapiens
  REGION 1..8: note = Heavy chain CDR1
GFTFDDYG

SEQ ID NO: 10507 - protein, 8 aa, Homo sapiens
  REGION 1..8: note = Heavy chain CDR1
GFTFSSYG

SEQ ID NO: 10508 - protein, 8 aa, Homo sapiens
  REGION 1..8: note = Heavy chain CDR1
GFTFDDYG

SEQ ID NO: 10509 - protein, 8 aa, Homo sapiens
  REGION 1..8: note = Heavy chain CDR1
GGSISSYY

SEQ ID NO: 10510 - protein, 8 aa, Homo sapiens
  REGION 1..8: note = Heavy chain CDR1
GGSISSYY

SEQ ID NO: 10511 - protein, 8 aa, Homo sapiens
  REGION 1..8: note = Heavy chain CDR1
GYTFTSYG

SEQ ID NO: 10512 - protein, 8 aa, Homo sapiens
  REGION 1..8: note = Heavy chain CDR1
GGSISSYY

SEQ ID NO: 10513 - protein, 8 aa, Homo sapiens
  REGION 1..8: note = Heavy chain CDR1
GGSISSYY

SEQ ID NO: 10514 - protein, 8 aa, Homo sapiens
  REGION 1..8: note = Heavy chain CDR1
GFTFNNYG

SEQ ID NO: 10515 - protein, 8 aa, Homo sapiens
  REGION 1..8: note = Heavy chain CDR1
GYTFTSYG

SEQ ID NO: 10516 - protein, 10 aa, Homo sapiens
  REGION 1..10: note = Heavy chain CDR1
GGSISSSSYY

SEQ ID NO: 10517 - protein, 8 aa, Homo sapiens
  REGION 1..8: note = Heavy chain CDR1
GGSISSYY

SEQ ID NO: 10518 - protein, 8 aa, Homo sapiens
  REGION 1..8: note = Heavy chain CDR1
GFTFSNAW

SEQ ID NO: 10519 - protein, 8 aa, Homo sapiens
  REGION 1..8: note = Heavy chain CDR1
GFTFDDYG

SEQ ID NO: 10520 - protein, 10 aa, Homo sapiens
  REGION 1..10: note = Heavy chain CDR1
GGSISSSSYY

SEQ ID NO: 10521 - protein, 10 aa, Homo sapiens
  REGION 1..10: note = Heavy chain CDR1
GGSISSSSYY

SEQ ID NO: 10522 - protein, 8 aa, Homo sapiens
  REGION 1..8: note = Heavy chain CDR1
GGSISSYY

SEQ ID NO: 10523 - protein, 10 aa, Homo sapiens
  REGION 1..10: note = Heavy chain CDR1
GGSISSSSYY

SEQ ID NO: 10524 - protein, 8 aa, Homo sapiens
  REGION 1..8: note = Heavy chain CDR1
GFTFDDYG

SEQ ID NO: 10525 - protein, 8 aa, Homo sapiens
  REGION 1..8: note = Heavy chain CDR1
GFTFDDYG

SEQ ID NO: 10526 - protein, 8 aa, Homo sapiens
  REGION 1..8: note = Heavy chain CDR1
GFTFSSYG

SEQ ID NO: 10527 - protein, 8 aa, Homo sapiens
  REGION 1..8: note = Heavy chain CDR1
GFTFNSYG

SEQ ID NO: 10528 - protein, 8 aa, Homo sapiens
  REGION 1..8: note = Heavy chain CDR1
GFTFSSYG

SEQ ID NO: 10529 - protein, 8 aa, Homo sapiens
  REGION 1..8: note = Heavy chain CDR1
GFTLSSYG

SEQ ID NO: 10530 - protein, 10 aa, Homo sapiens
  REGION 1..10: note = Heavy chain CDR1
GGSISSNSYY

SEQ ID NO: 10531 - protein, 8 aa, Homo sapiens
  REGION 1..8: note = Heavy chain CDR1
GFTFSTYG

SEQ ID NO: 10532 - protein, 8 aa, Homo sapiens
  REGION 1..8: note = Heavy chain CDR1
GFTFSSHG

SEQ ID NO: 10533 - protein, 8 aa, Homo sapiens
  REGION 1..8: note = Heavy chain CDR1
GFTFSSYG

SEQ ID NO: 10534 - protein, 8 aa, Homo sapiens
  REGION 1..8: note = Heavy chain CDR1
GFTFNSYG

SEQ ID NO: 10535 - protein, 8 aa, Homo sapiens
  REGION 1..8: note = Heavy chain CDR1
GFTLSRYG

SEQ ID NO: 10536 - protein, 8 aa, Homo sapiens
  REGION 1..8: note = Heavy chain CDR1
GFTFRSFG

SEQ ID NO: 10537 - protein, 8 aa, Homo sapiens
  REGION 1..8: note = Heavy chain CDR1
GFTFSSYG

SEQ ID NO: 10538 - protein, 8 aa, Homo sapiens
  REGION 1..8: note = Heavy chain CDR1
GFTFSRYG

SEQ ID NO: 10539 - protein, 8 aa, Homo sapiens
  REGION 1..8: note = Heavy chain CDR1
GFTFSTYG

SEQ ID NO: 10540 - protein, 8 aa, Homo sapiens
  REGION 1..8: note = Heavy chain CDR1
GFTFSSYG

SEQ ID NO: 10541 - protein, 8 aa, Homo sapiens
  REGION 1..8: note = Heavy chain CDR1
GFTFSSYG

SEQ ID NO: 10542 - protein, 8 aa, Homo sapiens
  REGION 1..8: note = Heavy chain CDR1
GFTFSSYG

SEQ ID NO: 10543 - protein, 8 aa, Homo sapiens
  REGION 1..8: note = Heavy chain CDR1
GFTFSRFG

SEQ ID NO: 10544 - protein, 8 aa, Homo sapiens
  REGION 1..8: note = Heavy chain CDR1
GFTLSRYG

SEQ ID NO: 10545 - protein, 8 aa, Homo sapiens
  REGION 1..8: note = Heavy chain CDR1
GFTFSSYG

SEQ ID NO: 10546 - protein, 8 aa, Homo sapiens
  REGION 1..8: note = Heavy chain CDR1
GFTFSNYC

SEQ ID NO: 10547 - protein, 8 aa, Homo sapiens
  REGION 1..8: note = Heavy chain CDR1
GFTFSSYG

SEQ ID NO: 10548 - protein, 8 aa, Homo sapiens
  REGION 1..8: note = Heavy chain CDR1
GFTFNSYG

SEQ ID NO: 10549 - protein, 8 aa, Homo sapiens
  REGION 1..8: note = Heavy chain CDR1
GFTFNSYG

SEQ ID NO: 10550 - protein, 8 aa, Homo sapiens
  REGION 1..8: note = Heavy chain CDR1
GFTLSSYG

SEQ ID NO: 10551 - protein, 8 aa, Homo sapiens
  REGION 1..8: note = Heavy chain CDR1
GFTFNSYG

SEQ ID NO: 10552 - protein, 8 aa, Homo sapiens
  REGION 1..8: note = Heavy chain CDR1
GFTFSSYG

SEQ ID NO: 10553 - protein, 8 aa, Homo sapiens
  REGION 1..8: note = Heavy chain CDR1
GFTFSRFG

SEQ ID NO: 10554 - protein, 8 aa, Homo sapiens
  REGION 1..8: note = Heavy chain CDR1
GFTLSSYG

SEQ ID NO: 10555 - protein, 8 aa, Homo sapiens
  REGION 1..8: note = Heavy chain CDR1
GFTFSSYG

SEQ ID NO: 10556 - protein, 8 aa, Homo sapiens
  REGION 1..8: note = Heavy chain CDR1
GFTFSSYG

SEQ ID NO: 10557 - protein, 8 aa, Homo sapiens
  REGION 1..8: note = Heavy chain CDR1
GFTFRSFG

SEQ ID NO: 10558 - protein, 8 aa, Homo sapiens
  REGION 1..8: note = Heavy chain CDR1
GFTFNSYG

SEQ ID NO: 10559 - protein, 8 aa, Homo sapiens
  REGION 1..8: note = Heavy chain CDR1
GFTFSSYG

SEQ ID NO: 10560 - protein, 8 aa, Homo sapiens
  REGION 1..8: note = Heavy chain CDR1
GFTFSSYG

SEQ ID NO: 10561 - protein, 8 aa, Homo sapiens
  REGION 1..8: note = Heavy chain CDR1
GFTFSSYG

SEQ ID NO: 10562 - protein, 8 aa, Homo sapiens
  REGION 1..8: note = Heavy chain CDR1
GFTFSSYG

SEQ ID NO: 10563 - protein, 8 aa, Homo sapiens
  REGION 1..8: note = Heavy chain CDR1
GITFSSYG

SEQ ID NO: 10564 - protein, 8 aa, Homo sapiens
  REGION 1..8: note = Heavy chain CDR1
GFTFSSYG

SEQ ID NO: 10565 - protein, 8 aa, Homo sapiens
  REGION 1..8: note = Heavy chain CDR1
GFTFSSYG

SEQ ID NO: 10566 - protein, 8 aa, Homo sapiens
  REGION 1..8: note = Heavy chain CDR1
GFTFSSYG

SEQ ID NO: 10567 - protein, 10 aa, Homo sapiens
  REGION 1..10: note = Heavy chain CDR1
GGSISSSSYY

SEQ ID NO: 10568 - protein, 10 aa, Homo sapiens
  REGION 1..10: note = Heavy chain CDR1
GGSISSSSYY

SEQ ID NO: 10569 - protein, 8 aa, Homo sapiens
  REGION 1..8: note = Heavy chain CDR1
GITFSSYG

SEQ ID NO: 10570 - protein, 8 aa, Homo sapiens
  REGION 1..8: note = Heavy chain CDR1
GVTLSSYG

SEQ ID NO: 10571 - protein, 8 aa, Homo sapiens
  REGION 1..8: note = Heavy chain CDR1
GFTFSSYG

SEQ ID NO: 10572 - protein, 10 aa, Homo sapiens
  REGION 1..10: note = Heavy chain CDR1
GGSISSSSYY

SEQ ID NO: 10573 - protein, 8 aa, Homo sapiens
  REGION 1..8: note = Heavy chain CDR1
GFTFSSYG

SEQ ID NO: 10574 - protein, 8 aa, Homo sapiens
  REGION 1..8: note = Heavy chain CDR1
GFTFSSYG

SEQ ID NO: 10575 - protein, 10 aa, Homo sapiens
  REGION 1..10: note = Heavy chain CDR1
GGSISSSSYY

SEQ ID NO: 10576 - protein, 8 aa, Homo sapiens
  REGION 1..8: note = Heavy chain CDR1
GFTFSSYG

SEQ ID NO: 10577 - protein, 8 aa, Homo sapiens
  REGION 1..8: note = Heavy chain CDR1
GFTFSSYG

SEQ ID NO: 10578 - protein, 10 aa, Homo sapiens
  REGION 1..10: note = Heavy chain CDR1
GGSISSSSYY

SEQ ID NO: 10579 - protein, 8 aa, Homo sapiens
  REGION 1..8: note = Heavy chain CDR1
GITFSSYG

SEQ ID NO: 10580 - protein, 8 aa, Homo sapiens
  REGION 1..8: note = Heavy chain CDR1
GFTFSSYG

SEQ ID NO: 10581 - protein, 8 aa, Homo sapiens
  REGION 1..8: note = Heavy chain CDR1
GFTFSSYG

SEQ ID NO: 10582 - protein, 8 aa, Homo sapiens
  REGION 1..8: note = Heavy chain CDR1
GFTFSSYN

SEQ ID NO: 10583 - protein, 10 aa, Homo sapiens
  REGION 1..10: note = Heavy chain CDR1
GGSISSSSYY

SEQ ID NO: 10584 - protein, 10 aa, Homo sapiens
  REGION 1..10: note = Heavy chain CDR1
GGSISSSSYY

SEQ ID NO: 10585 - protein, 8 aa, Homo sapiens
  REGION 1..8: note = Heavy chain CDR1
GFTFSSYG

SEQ ID NO: 10586 - protein, 8 aa, Homo sapiens
  REGION 1..8: note = Heavy chain CDR1
GFTFGDYV

SEQ ID NO: 10587 - protein, 8 aa, Homo sapiens
  REGION 1..8: note = Heavy chain CDR1
GGSISSYY

SEQ ID NO: 10588 - protein, 10 aa, Homo sapiens
  REGION 1..10: note = Heavy chain CDR1
GGSISSSSYY

SEQ ID NO: 10589 - protein, 10 aa, Homo sapiens
  REGION 1..10: note = Heavy chain CDR1
GGSISSSSYY

SEQ ID NO: 10590 - protein, 8 aa, Homo sapiens
  REGION 1..8: note = Heavy chain CDR1
GFTFSSYG

SEQ ID NO: 10591 - protein, 10 aa, Homo sapiens
  REGION 1..10: note = Heavy chain CDR1
GGSISSSSYY

SEQ ID NO: 10592 - protein, 10 aa, Homo sapiens
  REGION 1..10: note = Heavy chain CDR1
GGSISSSSYY

SEQ ID NO: 10593 - protein, 8 aa, Homo sapiens
  REGION 1..8: note = Heavy chain CDR1
GFTFSSYG

SEQ ID NO: 10594 - protein, 8 aa, Homo sapiens
  REGION 1..8: note = Heavy chain CDR1
GFTFSSYG

SEQ ID NO: 10595 - protein, 8 aa, Homo sapiens
  REGION 1..8: note = Heavy chain CDR1
GFTFSSYG

SEQ ID NO: 10596 - protein, 8 aa, Homo sapiens
  REGION 1..8: note = Heavy chain CDR1
GFTFSSYG

SEQ ID NO: 10597 - protein, 8 aa, Homo sapiens
  REGION 1..8: note = Heavy chain CDR1
GFTFSSYG

SEQ ID NO: 10598 - protein, 10 aa, Homo sapiens
  REGION 1..10: note = Heavy chain CDR1
GGSISSSSYY

SEQ ID NO: 10599 - protein, 8 aa, Homo sapiens
  REGION 1..8: note = Heavy chain CDR1
GFTFSSYG

SEQ ID NO: 10600 - protein, 8 aa, Homo sapiens
  REGION 1..8: note = Heavy chain CDR1
GFTFSSYG

SEQ ID NO: 10601 - protein, 8 aa, Homo sapiens
  REGION 1..8: note = Heavy chain CDR1
GFTFSSYG

SEQ ID NO: 10602 - protein, 10 aa, Homo sapiens
  REGION 1..10: note = Heavy chain CDR1
GGSISSSSYY

SEQ ID NO: 10603 - protein, 8 aa, Homo sapiens
  REGION 1..8: note = Heavy chain CDR1
GFTFSSYG

SEQ ID NO: 10604 - protein, 8 aa, Homo sapiens
  REGION 1..8: note = Heavy chain CDR1
GFTFSSYG

SEQ ID NO: 10605 - protein, 10 aa, Homo sapiens
  REGION 1..10: note = Heavy chain CDR1
GGSISSSSYY

SEQ ID NO: 10606 - protein, 10 aa, Homo sapiens
  REGION 1..10: note = Heavy chain CDR1
GGSISSSSYY

SEQ ID NO: 10607 - protein, 8 aa, Homo sapiens
  REGION 1..8: note = Heavy chain CDR1
GFTFSSYG

SEQ ID NO: 10608 - protein, 10 aa, Homo sapiens
  REGION 1..10: note = Heavy chain CDR1
GGSISSSSYY

SEQ ID NO: 10609 - protein, 8 aa, Homo sapiens
  REGION 1..8: note = Heavy chain CDR1
GFTFSSYG

SEQ ID NO: 10610 - protein, 8 aa, Homo sapiens
  REGION 1..8: note = Heavy chain CDR1
GFTFSSYG

SEQ ID NO: 10611 - protein, 8 aa, Homo sapiens
  REGION 1..8: note = Heavy chain CDR1
GFTFSSYG

SEQ ID NO: 10612 - protein, 8 aa, Homo sapiens
  REGION 1..8: note = Heavy chain CDR1
GFTFDDYG

SEQ ID NO: 10613 - protein, 8 aa, Homo sapiens
  REGION 1..8: note = Heavy chain CDR1
GFTFDDYG

SEQ ID NO: 10614 - protein, 8 aa, Homo sapiens
  REGION 1..8: note = Heavy chain CDR1
GYTFTSYG

SEQ ID NO: 10615 - protein, 8 aa, Homo sapiens
  REGION 1..8: note = Heavy chain CDR1
GFAFDDFG

SEQ ID NO: 10616 - protein, 8 aa, Homo sapiens
  REGION 1..8: note = Heavy chain CDR1
GYTFTSYG

SEQ ID NO: 10617 - protein, 8 aa, Homo sapiens
  REGION 1..8: note = Heavy chain CDR1
GYTFTSYG

SEQ ID NO: 10618 - protein, 8 aa, Homo sapiens
  REGION 1..8: note = Heavy chain CDR1
GFTFSSHG

SEQ ID NO: 10619 - protein, 8 aa, Homo sapiens
  REGION 1..8: note = Heavy chain CDR1
GFTFSSYG

SEQ ID NO: 10620 - protein, 8 aa, Homo sapiens
  REGION 1..8: note = Heavy chain CDR1
GYTFTSYY

SEQ ID NO: 10621 - protein, 8 aa, Homo sapiens
  REGION 1..8: note = Heavy chain CDR1
GFTFRGYG

SEQ ID NO: 10622 - protein, 8 aa, Homo sapiens
  REGION 1..8: note = Heavy chain CDR1
GFTFSSYG

SEQ ID NO: 10623 - protein, 8 aa, Homo sapiens
  REGION 1..8: note = Heavy chain CDR1
GYTFTSYY

SEQ ID NO: 10624 - protein, 8 aa, Homo sapiens
  REGION 1..8: note = Heavy chain CDR1
GFTFSSYG

SEQ ID NO: 10625 - protein, 8 aa, Homo sapiens
  REGION 1..8: note = Heavy chain CDR1
GFTFSSYG

SEQ ID NO: 10626 - protein, 8 aa, Homo sapiens
  REGION 1..8: note = Heavy chain CDR1
GFTFNSYG

SEQ ID NO: 10627 - protein, 8 aa, Homo sapiens
  REGION 1..8: note = Heavy chain CDR1
GFTFSNYG

SEQ ID NO: 10628 - protein, 8 aa, Homo sapiens
  REGION 1..8: note = Heavy chain CDR1
GYTFTNYG

SEQ ID NO: 10629 - protein, 8 aa, Homo sapiens
  REGION 1..8: note = Heavy chain CDR1
GFTFSSYG

SEQ ID NO: 10630 - protein, 8 aa, Homo sapiens
  REGION 1..8: note = Heavy chain CDR1
GYTFTSYG

SEQ ID NO: 10631 - protein, 8 aa, Homo sapiens
  REGION 1..8: note = Heavy chain CDR1
GYTFTNYG

SEQ ID NO: 10632 - protein, 8 aa, Homo sapiens
  REGION 1..8: note = Heavy chain CDR1
GFTFSSYG

SEQ ID NO: 10633 - protein, 8 aa, Homo sapiens
  REGION 1..8: note = Heavy chain CDR1
GFSFDDFG

SEQ ID NO: 10634 - protein, 8 aa, Homo sapiens
  REGION 1..8: note = Heavy chain CDR1
GFTFDDYG

SEQ ID NO: 10635 - protein, 8 aa, Homo sapiens
  REGION 1..8: note = Heavy chain CDR1
GFTFSYAW

SEQ ID NO: 10636 - protein, 8 aa, Homo sapiens
  REGION 1..8: note = Heavy chain CDR1
GFTFRGYG

SEQ ID NO: 10637 - protein, 8 aa, Homo sapiens
  REGION 1..8: note = Heavy chain CDR1
GFTFSSYG

SEQ ID NO: 10638 - protein, 8 aa, Homo sapiens
  REGION 1..8: note = Heavy chain CDR1
GFTFRGYG

SEQ ID NO: 10639 - protein, 8 aa, Homo sapiens
  REGION 1..8: note = Heavy chain CDR1
GFSFDDYG

SEQ ID NO: 10640 - protein, 8 aa, Homo sapiens
  REGION 1..8: note = Heavy chain CDR1
GFTFRGYG

SEQ ID NO: 10641 - protein, 8 aa, Homo sapiens
  REGION 1..8: note = Heavy chain CDR1
GFTFSSFG

SEQ ID NO: 10642 - protein, 8 aa, Homo sapiens
  REGION 1..8: note = Heavy chain CDR1
GFTFRGYG

SEQ ID NO: 10643 - protein, 8 aa, Homo sapiens
  REGION 1..8: note = Heavy chain CDR1
GFTFSSYG

SEQ ID NO: 10644 - protein, 8 aa, Homo sapiens
  REGION 1..8: note = Heavy chain CDR1
GFMFSSYG

SEQ ID NO: 10645 - protein, 8 aa, Homo sapiens
  REGION 1..8: note = Heavy chain CDR1
GFTFSSYG

SEQ ID NO: 10646 - protein, 8 aa, Homo sapiens
  REGION 1..8: note = Heavy chain CDR1
GFTFSSYG

SEQ ID NO: 10647 - protein, 8 aa, Homo sapiens
  REGION 1..8: note = Heavy chain CDR1
GFTFSSYG

SEQ ID NO: 10648 - protein, 8 aa, Homo sapiens
  REGION 1..8: note = Heavy chain CDR1
GFTFDDYG

SEQ ID NO: 10649 - protein, 8 aa, Homo sapiens
  REGION 1..8: note = Heavy chain CDR1
GYTFTSYG

SEQ ID NO: 10650 - protein, 8 aa, Homo sapiens
  REGION 1..8: note = Heavy chain CDR1
GFTFDDYG

SEQ ID NO: 10651 - protein, 8 aa, Homo sapiens
  REGION 1..8: note = Heavy chain CDR1
GFTFSSYG

SEQ ID NO: 10652 - protein, 8 aa, Homo sapiens
  REGION 1..8: note = Heavy chain CDR1
GFTFSSYG

SEQ ID NO: 10653 - protein, 8 aa, Homo sapiens
  REGION 1..8: note = Heavy chain CDR1
GYTFTSYG

SEQ ID NO: 10654 - protein, 8 aa, Homo sapiens
  REGION 1..8: note = Heavy chain CDR1
GFTFSSYG

SEQ ID NO: 10655 - protein, 8 aa, Homo sapiens
  REGION 1..8: note = Heavy chain CDR1
GFTFSSYG

SEQ ID NO: 10656 - protein, 8 aa, Homo sapiens
  REGION 1..8: note = Heavy chain CDR1
GFTFADYG

SEQ ID NO: 10657 - protein, 8 aa, Homo sapiens
  REGION 1..8: note = Heavy chain CDR1
GFTLSSYG

SEQ ID NO: 10658 - protein, 8 aa, Homo sapiens
  REGION 1..8: note = Heavy chain CDR1
GFTFSSYG

SEQ ID NO: 10659 - protein, 8 aa, Homo sapiens
  REGION 1..8: note = Heavy chain CDR1
GFTFSSYG

SEQ ID NO: 10660 - protein, 8 aa, Homo sapiens
  REGION 1..8: note = Heavy chain CDR1
GFTFDDYG

SEQ ID NO: 10661 - protein, 8 aa, Homo sapiens
  REGION 1..8: note = Heavy chain CDR1
GFTFDDYG

SEQ ID NO: 10662 - protein, 8 aa, Homo sapiens
  REGION 1..8: note = Heavy chain CDR1
GFTFSNHG

SEQ ID NO: 10663 - protein, 8 aa, Homo sapiens
  REGION 1..8: note = Heavy chain CDR1
GYTFTSYG

SEQ ID NO: 10664 - protein, 8 aa, Homo sapiens
  REGION 1..8: note = Heavy chain CDR1
GFTFSYAW

SEQ ID NO: 10665 - protein, 8 aa, Homo sapiens
  REGION 1..8: note = Heavy chain CDR1
GYTFTSYY

SEQ ID NO: 10666 - protein, 8 aa, Homo sapiens
  REGION 1..8: note = Heavy chain CDR1
GYTFTSYY

SEQ ID NO: 10667 - protein, 8 aa, Homo sapiens
  REGION 1..8: note = Heavy chain CDR1
GYTFTSYG

SEQ ID NO: 10668 - protein, 8 aa, Homo sapiens
  REGION 1..8: note = Heavy chain CDR1
GFTFSSYG

SEQ ID NO: 10669 - protein, 8 aa, Homo sapiens
  REGION 1..8: note = Heavy chain CDR1
GFTFSSYG

SEQ ID NO: 10670 - protein, 8 aa, Homo sapiens
  REGION 1..8: note = Heavy chain CDR1
GFAFDDFG

SEQ ID NO: 10671 - protein, 8 aa, Homo sapiens
  REGION 1..8: note = Heavy chain CDR1
GYTFTSYY

SEQ ID NO: 10672 - protein, 8 aa, Homo sapiens
  REGION 1..8: note = Heavy chain CDR1
GFTFDDYG

SEQ ID NO: 10673 - protein, 8 aa, Homo sapiens
  REGION 1..8: note = Heavy chain CDR1
GYTFTSYG

SEQ ID NO: 10674 - protein, 8 aa, Homo sapiens
  REGION 1..8: note = Heavy chain CDR1
GFTFTSYY

SEQ ID NO: 10675 - protein, 8 aa, Homo sapiens
  REGION 1..8: note = Heavy chain CDR1
GFTFRGYG

SEQ ID NO: 10676 - protein, 8 aa, Homo sapiens
  REGION 1..8: note = Heavy chain CDR1
GFTFSSYG

SEQ ID NO: 10677 - protein, 8 aa, Homo sapiens
  REGION 1..8: note = Heavy chain CDR1
GFTFSSYG

SEQ ID NO: 10678 - protein, 8 aa, Homo sapiens
  REGION 1..8: note = Heavy chain CDR1
GFTFDDYG

SEQ ID NO: 10679 - protein, 8 aa, Homo sapiens
  REGION 1..8: note = Heavy chain CDR1
GFAFDDFG

SEQ ID NO: 10680 - protein, 8 aa, Homo sapiens
  REGION 1..8: note = Heavy chain CDR1
GFMFSSYG

SEQ ID NO: 10681 - protein, 8 aa, Homo sapiens
  REGION 1..8: note = Heavy chain CDR1
GFTLSSHG

SEQ ID NO: 10682 - protein, 8 aa, Homo sapiens
  REGION 1..8: note = Heavy chain CDR1
GFTFDDYG

SEQ ID NO: 10683 - protein, 8 aa, Homo sapiens
  REGION 1..8: note = Heavy chain CDR1
GFTFSSHG

SEQ ID NO: 10684 - protein, 8 aa, Homo sapiens
  REGION 1..8: note = Heavy chain CDR1
GYTFTSYY

SEQ ID NO: 10685 - protein, 8 aa, Homo sapiens
  REGION 1..8: note = Heavy chain CDR1
GFTFSSYG

SEQ ID NO: 10686 - protein, 8 aa, Homo sapiens
  REGION 1..8: note = Heavy chain CDR1
GFTFSSHG

SEQ ID NO: 10687 - protein, 8 aa, Homo sapiens
  REGION 1..8: note = Heavy chain CDR1
GFTFSSYG

SEQ ID NO: 10688 - protein, 8 aa, Homo sapiens
  REGION 1..8: note = Heavy chain CDR1
GYTFTNYG

SEQ ID NO: 10689 - protein, 8 aa, Homo sapiens
  REGION 1..8: note = Heavy chain CDR1
GFAFDDFG

SEQ ID NO: 10690 - protein, 8 aa, Homo sapiens
  REGION 1..8: note = Heavy chain CDR1
GYTFTSYG

SEQ ID NO: 10691 - protein, 8 aa, Homo sapiens
  REGION 1..8: note = Heavy chain CDR1
GFTFSSYG

SEQ ID NO: 10692 - protein, 8 aa, Homo sapiens
  REGION 1..8: note = Heavy chain CDR1
GFIFSSYG

SEQ ID NO: 10693 - protein, 8 aa, Homo sapiens
  REGION 1..8: note = Heavy chain CDR1
GFIFEDYG

SEQ ID NO: 10694 - protein, 8 aa, Homo sapiens
  REGION 1..8: note = Heavy chain CDR1
GFTFDDYG

SEQ ID NO: 10695 - protein, 8 aa, Homo sapiens
  REGION 1..8: note = Heavy chain CDR1
GYTFTSYY

SEQ ID NO: 10696 - protein, 8 aa, Homo sapiens
  REGION 1..8: note = Heavy chain CDR1
GFTFSSYG

SEQ ID NO: 10697 - protein, 8 aa, Homo sapiens
  REGION 1..8: note = Heavy chain CDR1
GFTFRGYG

SEQ ID NO: 10698 - protein, 8 aa, Homo sapiens
  REGION 1..8: note = Heavy chain CDR1
GFTFSNFG

SEQ ID NO: 10699 - protein, 8 aa, Homo sapiens
  REGION 1..8: note = Heavy chain CDR1
GYTFTSYG

SEQ ID NO: 10700 - protein, 8 aa, Homo sapiens
  REGION 1..8: note = Heavy chain CDR1
GFTFSSYG

SEQ ID NO: 10701 - protein, 8 aa, Homo sapiens
  REGION 1..8: note = Heavy chain CDR1
GFTFDDYG

SEQ ID NO: 10702 - protein, 8 aa, Homo sapiens
  REGION 1..8: note = Heavy chain CDR1
GFTFDDYG

SEQ ID NO: 10703 - protein, 8 aa, Homo sapiens
  REGION 1..8: note = Heavy chain CDR1
GFIFEDYG

SEQ ID NO: 10704 - protein, 8 aa, Homo sapiens
  REGION 1..8: note = Heavy chain CDR1
GFTFDDYG

SEQ ID NO: 10705 - protein, 8 aa, Homo sapiens
  REGION 1..8: note = Heavy chain CDR1
GYTFTSYG

SEQ ID NO: 10706 - protein, 8 aa, Homo sapiens
  REGION 1..8: note = Heavy chain CDR1
GFIFEDYG

SEQ ID NO: 10707 - protein, 8 aa, Homo sapiens
  REGION 1..8: note = Heavy chain CDR1
GFIFEDYG

SEQ ID NO: 10708 - protein, 8 aa, Homo sapiens
  REGION 1..8: note = Heavy chain CDR1
GFIFEDYG

SEQ ID NO: 10709 - protein, 8 aa, Homo sapiens
  REGION 1..8: note = Heavy chain CDR1
GFTFDDYG

SEQ ID NO: 10710 - protein, 8 aa, Homo sapiens
  REGION 1..8: note = Heavy chain CDR1
GFIFEDYG

SEQ ID NO: 10711 - protein, 8 aa, Homo sapiens
  REGION 1..8: note = Heavy chain CDR1
GFTLRGYG

SEQ ID NO: 10712 - protein, 8 aa, Homo sapiens
  REGION 1..8: note = Heavy chain CDR1
GFIFEDYG

SEQ ID NO: 10713 - protein, 8 aa, Homo sapiens
  REGION 1..8: note = Heavy chain CDR1
GYTFTSYG

SEQ ID NO: 10714 - protein, 8 aa, Homo sapiens
  REGION 1..8: note = Heavy chain CDR1
GFTFDDYG

SEQ ID NO: 10715 - protein, 8 aa, Homo sapiens
  REGION 1..8: note = Heavy chain CDR1
GFIFSSYG

SEQ ID NO: 10716 - protein, 8 aa, Homo sapiens
  REGION 1..8: note = Heavy chain CDR1
GYTFTNYG

SEQ ID NO: 10717 - protein, 8 aa, Homo sapiens
  REGION 1..8: note = Heavy chain CDR1
GFIFEDYG

SEQ ID NO: 10718 - protein, 8 aa, Homo sapiens
  REGION 1..8: note = Heavy chain CDR1
GYTFTSYG

SEQ ID NO: 10719 - protein, 8 aa, Homo sapiens
  REGION 1..8: note = Heavy chain CDR1
GFTFSSHG

SEQ ID NO: 10720 - protein, 8 aa, Homo sapiens
  REGION 1..8: note = Heavy chain CDR1
GYTFNSYG

SEQ ID NO: 10721 - protein, 8 aa, Homo sapiens
  REGION 1..8: note = Heavy chain CDR1
GFIFSSYG

SEQ ID NO: 10722 - protein, 8 aa, Homo sapiens
  REGION 1..8: note = Heavy chain CDR1
GFTFSSYG

SEQ ID NO: 10723 - protein, 8 aa, Homo sapiens
  REGION 1..8: note = Heavy chain CDR1
GFTFSSHG

SEQ ID NO: 10724 - protein, 8 aa, Homo sapiens
  REGION 1..8: note = Heavy chain CDR1
GFTFSSHG

SEQ ID NO: 10725 - protein, 8 aa, Homo sapiens
  REGION 1..8: note = Heavy chain CDR1
GFTFSSHA

SEQ ID NO: 10726 - protein, 8 aa, Homo sapiens
  REGION 1..8: note = Heavy chain CDR1
GFTFSSYG

SEQ ID NO: 10727 - protein, 8 aa, Homo sapiens
  REGION 1..8: note = Heavy chain CDR1
GGSISSYY

SEQ ID NO: 10728 - protein, 8 aa, Homo sapiens
  REGION 1..8: note = Heavy chain CDR1
GFTFSSHA

SEQ ID NO: 10729 - protein, 8 aa, Homo sapiens
  REGION 1..8: note = Heavy chain CDR1
GYTFTSYG

SEQ ID NO: 10730 - protein, 8 aa, Homo sapiens
  REGION 1..8: note = Heavy chain CDR1
GFTFSSHG

SEQ ID NO: 10731 - protein, 8 aa, Homo sapiens
  REGION 1..8: note = Heavy chain CDR1
GFTFSSYG

SEQ ID NO: 10732 - protein, 8 aa, Homo sapiens
  REGION 1..8: note = Heavy chain CDR1
GFTFSTHG

SEQ ID NO: 10733 - protein, 8 aa, Homo sapiens
  REGION 1..8: note = Heavy chain CDR1
GFTFSTHG

SEQ ID NO: 10734 - protein, 8 aa, Homo sapiens
  REGION 1..8: note = Heavy chain CDR1
GFTFSSYG

SEQ ID NO: 10735 - protein, 8 aa, Homo sapiens
  REGION 1..8: note = Heavy chain CDR1
GFTFSTHG

SEQ ID NO: 10736 - protein, 8 aa, Homo sapiens
  REGION 1..8: note = Heavy chain CDR1
GYTFTSYG

SEQ ID NO: 10737 - protein, 8 aa, Homo sapiens
  REGION 1..8: note = Heavy chain CDR1
GYTFTSYG

SEQ ID NO: 10738 - protein, 8 aa, Homo sapiens
  REGION 1..8: note = Heavy chain CDR1
GYTFTSYG

SEQ ID NO: 10739 - protein, 8 aa, Homo sapiens
  REGION 1..8: note = Heavy chain CDR1
GYTFTSYG

SEQ ID NO: 10740 - protein, 8 aa, Homo sapiens
  REGION 1..8: note = Heavy chain CDR1
GYTFTSYG

SEQ ID NO: 10741 - protein, 8 aa, Homo sapiens
  REGION 1..8: note = Heavy chain CDR1
GFTFSSYG

SEQ ID NO: 10742 - protein, 8 aa, Homo sapiens
  REGION 1..8: note = Heavy chain CDR1
GFTFSSYG

SEQ ID NO: 10743 - protein, 8 aa, Homo sapiens
  REGION 1..8: note = Heavy chain CDR1
GFTFSSHG

SEQ ID NO: 10744 - protein, 8 aa, Homo sapiens
  REGION 1..8: note = Heavy chain CDR1
GYTFTSYG

SEQ ID NO: 10745 - protein, 8 aa, Homo sapiens
  REGION 1..8: note = Heavy chain CDR1
GYTFTNYG

SEQ ID NO: 10746 - protein, 8 aa, Homo sapiens
  REGION 1..8: note = Heavy chain CDR1
GYTFTSYG

SEQ ID NO: 10747 - protein, 8 aa, Homo sapiens
  REGION 1..8: note = Heavy chain CDR1
GYTFTSYG

SEQ ID NO: 10748 - protein, 8 aa, Homo sapiens
  REGION 1..8: note = Heavy chain CDR1
GFTFSSYG

SEQ ID NO: 10749 - protein, 8 aa, Homo sapiens
  REGION 1..8: note = Heavy chain CDR1
GYTFTSYG

SEQ ID NO: 10750 - protein, 8 aa, Homo sapiens
  REGION 1..8: note = Heavy chain CDR1
GFTFSTHG

SEQ ID NO: 10751 - protein, 8 aa, Homo sapiens
  REGION 1..8: note = Heavy chain CDR1
GFTFSSHG

SEQ ID NO: 10752 - protein, 8 aa, Homo sapiens
  REGION 1..8: note = Heavy chain CDR1
GYTFTSYG

SEQ ID NO: 10753 - protein, 8 aa, Homo sapiens
  REGION 1..8: note = Heavy chain CDR1
GFTFSSHG

SEQ ID NO: 10754 - protein, 8 aa, Homo sapiens
  REGION 1..8: note = Heavy chain CDR1
GYTFNSYG

SEQ ID NO: 10755 - protein, 8 aa, Homo sapiens
  REGION 1..8: note = Heavy chain CDR1
GFTFSSYG

SEQ ID NO: 10756 - protein, 8 aa, Homo sapiens
  REGION 1..8: note = Heavy chain CDR1
GFTFSSYG

SEQ ID NO: 10757 - protein, 8 aa, Homo sapiens
  REGION 1..8: note = Heavy chain CDR1
GFTFSSHG

SEQ ID NO: 10758 - protein, 8 aa, Homo sapiens
  REGION 1..8: note = Heavy chain CDR1
GFTFSSHG

SEQ ID NO: 10759 - protein, 8 aa, Homo sapiens
  REGION 1..8: note = Heavy chain CDR1
GFTFSSYG

SEQ ID NO: 10760 - protein, 8 aa, Homo sapiens
  REGION 1..8: note = Heavy chain CDR1
GFTFSSYG

SEQ ID NO: 10761 - protein, 8 aa, Homo sapiens
  REGION 1..8: note = Heavy chain CDR1
GFTFSSYG

SEQ ID NO: 10762 - protein, 8 aa, Homo sapiens
  REGION 1..8: note = Heavy chain CDR1
GFTFRSYG

SEQ ID NO: 10763 - protein, 8 aa, Homo sapiens
  REGION 1..8: note = Heavy chain CDR1
GFTFSSYG

SEQ ID NO: 10764 - protein, 8 aa, Homo sapiens
  REGION 1..8: note = Heavy chain CDR1
GFTFSSYG

SEQ ID NO: 10765 - protein, 8 aa, Homo sapiens
  REGION 1..8: note = Heavy chain CDR1
GFAFSSYG

SEQ ID NO: 10766 - protein, 8 aa, Homo sapiens
  REGION 1..8: note = Heavy chain CDR1
GFTFSSYG

SEQ ID NO: 10767 - protein, 8 aa, Homo sapiens
  REGION 1..8: note = Heavy chain CDR1
GFTFSSYG

SEQ ID NO: 10768 - protein, 8 aa, Homo sapiens
  REGION 1..8: note = Heavy chain CDR1
GFTFSSYG

SEQ ID NO: 10769 - protein, 8 aa, Homo sapiens
  REGION 1..8: note = Heavy chain CDR1
GFTFSSYG

SEQ ID NO: 10770 - protein, 8 aa, Homo sapiens
  REGION 1..8: note = Heavy chain CDR1
GFTFSSYG

SEQ ID NO: 10771 - protein, 8 aa, Homo sapiens
  REGION 1..8: note = Heavy chain CDR1
GFTFSSYG

SEQ ID NO: 10772 - protein, 8 aa, Homo sapiens
  REGION 1..8: note = Heavy chain CDR1
GFTFSSYG

SEQ ID NO: 10773 - protein, 8 aa, Homo sapiens
  REGION 1..8: note = Heavy chain CDR1
GFTFSSYG

SEQ ID NO: 10774 - protein, 8 aa, Homo sapiens
  REGION 1..8: note = Heavy chain CDR1
GFTFSSYG

SEQ ID NO: 10775 - protein, 8 aa, Homo sapiens
  REGION 1..8: note = Heavy chain CDR1
GFTFSSYG

SEQ ID NO: 10776 - protein, 8 aa, Homo sapiens
  REGION 1..8: note = Heavy chain CDR1
GFTFSSYG

SEQ ID NO: 10777 - protein, 8 aa, Homo sapiens
  REGION 1..8: note = Heavy chain CDR1
GFTFSSYG

SEQ ID NO: 10778 - protein, 8 aa, Homo sapiens
  REGION 1..8: note = Heavy chain CDR1
GFTFSSYG

SEQ ID NO: 10779 - protein, 8 aa, Homo sapiens
  REGION 1..8: note = Heavy chain CDR1
GFTFSSYG

SEQ ID NO: 10780 - protein, 8 aa, Homo sapiens
  REGION 1..8: note = Heavy chain CDR1
GFTFSSYG

SEQ ID NO: 10781 - protein, 8 aa, Homo sapiens
  REGION 1..8: note = Heavy chain CDR1
GFTFSSFG

SEQ ID NO: 10782 - protein, 8 aa, Homo sapiens
  REGION 1..8: note = Heavy chain CDR1
GFTFSSYG

SEQ ID NO: 10783 - protein, 8 aa, Homo sapiens
  REGION 1..8: note = Heavy chain CDR1
GFTFSSYG

SEQ ID NO: 10784 - protein, 8 aa, Homo sapiens
  REGION 1..8: note = Heavy chain CDR1
GGSISSYY

SEQ ID NO: 10785 - protein, 8 aa, Homo sapiens
  REGION 1..8: note = Heavy chain CDR1
GFIFSSYG

SEQ ID NO: 10786 - protein, 8 aa, Homo sapiens
  REGION 1..8: note = Heavy chain CDR1
GFTFSIYT

SEQ ID NO: 10787 - protein, 8 aa, Homo sapiens
  REGION 1..8: note = Heavy chain CDR1
GFTFSSFG

SEQ ID NO: 10788 - protein, 8 aa, Homo sapiens
  REGION 1..8: note = Heavy chain CDR1
GFTFSSYG

SEQ ID NO: 10789 - protein, 8 aa, Homo sapiens
  REGION 1..8: note = Heavy chain CDR1
GFTFSSHG

SEQ ID NO: 10790 - protein, 8 aa, Homo sapiens
  REGION 1..8: note = Heavy chain CDR1
GFTFSSHG

SEQ ID NO: 10791 - protein, 8 aa, Homo sapiens
  REGION 1..8: note = Heavy chain CDR1
GFTFSSYG

SEQ ID NO: 10792 - protein, 8 aa, Homo sapiens
  REGION 1..8: note = Heavy chain CDR1
GGSISSYY

SEQ ID NO: 10793 - protein, 8 aa, Homo sapiens
  REGION 1..8: note = Heavy chain CDR1
GFTFSSHG

SEQ ID NO: 10794 - protein, 8 aa, Homo sapiens
  REGION 1..8: note = Heavy chain CDR1
GFTFSSYG

SEQ ID NO: 10795 - protein, 8 aa, Homo sapiens
  REGION 1..8: note = Heavy chain CDR1
GFTFSSYG

SEQ ID NO: 10796 - protein, 8 aa, Homo sapiens
  REGION 1..8: note = Heavy chain CDR1
GFTFSNYG

SEQ ID NO: 10797 - protein, 8 aa, Homo sapiens
  REGION 1..8: note = Heavy chain CDR1
GFTFSSYG

SEQ ID NO: 10798 - protein, 8 aa, Homo sapiens
  REGION 1..8: note = Heavy chain CDR1
GFTFSSYW

SEQ ID NO: 10799 - protein, 8 aa, Homo sapiens
  REGION 1..8: note = Heavy chain CDR1
GFTFSSYA

SEQ ID NO: 10800 - protein, 10 aa, Homo sapiens
  REGION 1..10: note = Heavy chain CDR1
GGSISSSSYY

SEQ ID NO: 10801 - protein, 8 aa, Homo sapiens
  REGION 1..8: note = Heavy chain CDR1
GFTFSSYG

SEQ ID NO: 10802 - protein, 8 aa, Homo sapiens
  REGION 1..8: note = Heavy chain CDR1
GFTLSSYG

SEQ ID NO: 10803 - protein, 8 aa, Homo sapiens
  REGION 1..8: note = Heavy chain CDR1
GFTFSSYG

SEQ ID NO: 10804 - protein, 8 aa, Homo sapiens
  REGION 1..8: note = Heavy chain CDR1
GYTFTSYG

SEQ ID NO: 10805 - protein, 8 aa, Homo sapiens
  REGION 1..8: note = Heavy chain CDR1
GFTFSSYG

SEQ ID NO: 10806 - protein, 8 aa, Homo sapiens
  REGION 1..8: note = Heavy chain CDR1
GFTFSSYG

SEQ ID NO: 10807 - protein, 8 aa, Homo sapiens
  REGION 1..8: note = Heavy chain CDR1
GFTFSSFG

SEQ ID NO: 10808 - protein, 8 aa, Homo sapiens
  REGION 1..8: note = Heavy chain CDR1
GYTFTNYG

SEQ ID NO: 10809 - protein, 8 aa, Homo sapiens
  REGION 1..8: note = Heavy chain CDR1
GFTFSSYG

SEQ ID NO: 10810 - protein, 8 aa, Homo sapiens
  REGION 1..8: note = Heavy chain CDR1
GFTFSSYG

SEQ ID NO: 10811 - protein, 10 aa, Homo sapiens
  REGION 1..10: note = Heavy chain CDR1
GDSVSSNRAA

SEQ ID NO: 10812 - protein, 8 aa, Homo sapiens
  REGION 1..8: note = Heavy chain CDR1
GFTFGDYA

SEQ ID NO: 10813 - protein, 8 aa, Homo sapiens
  REGION 1..8: note = Heavy chain CDR1
GFTFSSYG

SEQ ID NO: 10814 - protein, 8 aa, Homo sapiens
  REGION 1..8: note = Heavy chain CDR1
GYTFTSYG

SEQ ID NO: 10815 - protein, 8 aa, Homo sapiens
  REGION 1..8: note = Heavy chain CDR1
GFTFRSYG

SEQ ID NO: 10816 - protein, 8 aa, Homo sapiens
  REGION 1..8: note = Heavy chain CDR1
GFTFSSYG

SEQ ID NO: 10817 - protein, 8 aa, Homo sapiens
  REGION 1..8: note = Heavy chain CDR1
GVSISSYY

SEQ ID NO: 10818 - protein, 8 aa, Homo sapiens
  REGION 1..8: note = Heavy chain CDR1
GFTFSSYG

SEQ ID NO: 10819 - protein, 8 aa, Homo sapiens
  REGION 1..8: note = Heavy chain CDR1
GFTFSSHG

SEQ ID NO: 10820 - protein, 8 aa, Homo sapiens
  REGION 1..8: note = Heavy chain CDR1
GFTFSSYG

SEQ ID NO: 10821 - protein, 8 aa, Homo sapiens
  REGION 1..8: note = Heavy chain CDR1
GFTFSSYG

SEQ ID NO: 10822 - protein, 8 aa, Homo sapiens
  REGION 1..8: note = Heavy chain CDR1
GFTFSSYG

SEQ ID NO: 10823 - protein, 8 aa, Homo sapiens
  REGION 1..8: note = Heavy chain CDR1
GFTFSNYG

SEQ ID NO: 10824 - protein, 8 aa, Homo sapiens
  REGION 1..8: note = Heavy chain CDR1
GFTFSSFG

SEQ ID NO: 10825 - protein, 8 aa, Homo sapiens
  REGION 1..8: note = Heavy chain CDR1
GFTFSSYG

SEQ ID NO: 10826 - protein, 8 aa, Homo sapiens
  REGION 1..8: note = Heavy chain CDR1
GFTFSSHG

SEQ ID NO: 10827 - protein, 8 aa, Homo sapiens
  REGION 1..8: note = Heavy chain CDR1
GFTFSSYG

SEQ ID NO: 10828 - protein, 8 aa, Homo sapiens
  REGION 1..8: note = Heavy chain CDR1
GYTFTSYG

SEQ ID NO: 10829 - protein, 8 aa, Homo sapiens
  REGION 1..8: note = Heavy chain CDR1
GFTFSSHG

SEQ ID NO: 10830 - protein, 8 aa, Homo sapiens
  REGION 1..8: note = Heavy chain CDR1
GFTFSSHG

SEQ ID NO: 10831 - protein, 8 aa, Homo sapiens
  REGION 1..8: note = Heavy chain CDR1
GFTFSSHG

SEQ ID NO: 10832 - protein, 8 aa, Homo sapiens
  REGION 1..8: note = Heavy chain CDR1
GFTFSSYG

SEQ ID NO: 10833 - protein, 8 aa, Homo sapiens
  REGION 1..8: note = Heavy chain CDR1
GFTFSSYG

SEQ ID NO: 10834 - protein, 8 aa, Homo sapiens
  REGION 1..8: note = Heavy chain CDR1
GFTFSSHG

SEQ ID NO: 10835 - protein, 8 aa, Homo sapiens
  REGION 1..8: note = Heavy chain CDR1
GFTFSSYG

SEQ ID NO: 10836 - protein, 8 aa, Homo sapiens
  REGION 1..8: note = Heavy chain CDR1
GFTFSSYG

SEQ ID NO: 10837 - protein, 8 aa, Homo sapiens
  REGION 1..8: note = Heavy chain CDR1
GFTFSSYG

SEQ ID NO: 10838 - protein, 8 aa, Homo sapiens
  REGION 1..8: note = Heavy chain CDR1
GFTFSSYG

SEQ ID NO: 10839 - protein, 8 aa, Homo sapiens
  REGION 1..8: note = Heavy chain CDR1
GFTFSSHG

SEQ ID NO: 10840 - protein, 8 aa, Homo sapiens
  REGION 1..8: note = Heavy chain CDR1
GFTFSSYG

SEQ ID NO: 10841 - protein, 8 aa, Homo sapiens
  REGION 1..8: note = Heavy chain CDR1
GFTFSNYA

SEQ ID NO: 10842 - protein, 8 aa, Homo sapiens
  REGION 1..8: note = Heavy chain CDR1
GFTFSSYG

SEQ ID NO: 10843 - protein, 8 aa, Homo sapiens
  REGION 1..8: note = Heavy chain CDR1
GFTFSSYG

SEQ ID NO: 10844 - protein, 8 aa, Homo sapiens
  REGION 1..8: note = Heavy chain CDR1
GFTFSSYG

SEQ ID NO: 10845 - protein, 8 aa, Homo sapiens
  REGION 1..8: note = Heavy chain CDR1
GFTFSSHG

SEQ ID NO: 10846 - protein, 8 aa, Homo sapiens
  REGION 1..8: note = Heavy chain CDR1
GFTFSSYG

SEQ ID NO: 10847 - protein, 8 aa, Homo sapiens
  REGION 1..8: note = Heavy chain CDR1
GFTFSSHG

SEQ ID NO: 10848 - protein, 8 aa, Homo sapiens
  REGION 1..8: note = Heavy chain CDR1
GFTFSSYG

SEQ ID NO: 10849 - protein, 8 aa, Homo sapiens
  REGION 1..8: note = Heavy chain CDR1
GFTFSSHG

SEQ ID NO: 10850 - protein, 8 aa, Homo sapiens
  REGION 1..8: note = Heavy chain CDR1
GFTFSSHG

SEQ ID NO: 10851 - protein, 8 aa, Homo sapiens
  REGION 1..8: note = Heavy chain CDR1
GFTFSSHG

SEQ ID NO: 10852 - protein, 8 aa, Homo sapiens
  REGION 1..8: note = Heavy chain CDR1
GFTFSSHG

SEQ ID NO: 10853 - protein, 8 aa, Homo sapiens
  REGION 1..8: note = Heavy chain CDR1
GFTFSSHG

SEQ ID NO: 10854 - protein, 8 aa, Homo sapiens
  REGION 1..8: note = Heavy chain CDR1
GFTFSSYG

SEQ ID NO: 10855 - protein, 8 aa, Homo sapiens
  REGION 1..8: note = Heavy chain CDR1
GFTFSSYG

SEQ ID NO: 10856 - protein, 8 aa, Homo sapiens
  REGION 1..8: note = Heavy chain CDR1
GFTFSSYG

SEQ ID NO: 10857 - protein, 8 aa, Homo sapiens
  REGION 1..8: note = Heavy chain CDR1
GFTFSSYG

SEQ ID NO: 10858 - protein, 8 aa, Homo sapiens
  REGION 1..8: note = Heavy chain CDR1
GYTFTDYG

SEQ ID NO: 10859 - protein, 8 aa, Homo sapiens
  REGION 1..8: note = Heavy chain CDR1
GFTLSSFG

SEQ ID NO: 10860 - protein, 8 aa, Homo sapiens
  REGION 1..8: note = Heavy chain CDR1
GFTFSNYA

SEQ ID NO: 10861 - protein, 8 aa, Homo sapiens
  REGION 1..8: note = Heavy chain CDR1
GFTFSSYG

SEQ ID NO: 10862 - protein, 8 aa, Homo sapiens
  REGION 1..8: note = Heavy chain CDR1
GFTFRSYG

SEQ ID NO: 10863 - protein, 8 aa, Homo sapiens
  REGION 1..8: note = Heavy chain CDR1
GFTFSSYG

SEQ ID NO: 10864 - protein, 8 aa, Homo sapiens
  REGION 1..8: note = Heavy chain CDR1
GFTFSSYG

SEQ ID NO: 10865 - protein, 8 aa, Homo sapiens
  REGION 1..8: note = Heavy chain CDR1
GFTFSSYA

SEQ ID NO: 10866 - protein, 8 aa, Homo sapiens
  REGION 1..8: note = Heavy chain CDR1
GFTFSSYG

SEQ ID NO: 10867 - protein, 8 aa, Homo sapiens
  REGION 1..8: note = Heavy chain CDR1
GFTFSRFG

SEQ ID NO: 10868 - protein, 8 aa, Homo sapiens
  REGION 1..8: note = Heavy chain CDR1
GYTFNYYG

SEQ ID NO: 10869 - protein, 8 aa, Homo sapiens
  REGION 1..8: note = Heavy chain CDR1
GFTLSSFG

SEQ ID NO: 10870 - protein, 8 aa, Homo sapiens
  REGION 1..8: note = Heavy chain CDR1
GFTFSNYG

SEQ ID NO: 10871 - protein, 8 aa, Homo sapiens
  REGION 1..8: note = Heavy chain CDR1
GFTFNSYG

SEQ ID NO: 10872 - protein, 8 aa, Homo sapiens
  REGION 1..8: note = Heavy chain CDR1
GFTFSSYG

SEQ ID NO: 10873 - protein, 8 aa, Homo sapiens
  REGION 1..8: note = Heavy chain CDR1
DYTFTYYG

SEQ ID NO: 10874 - protein, 8 aa, Homo sapiens
  REGION 1..8: note = Heavy chain CDR1
GYTFTSYG

SEQ ID NO: 10875 - protein, 8 aa, Homo sapiens
  REGION 1..8: note = Heavy chain CDR1
GFTFSSYG

SEQ ID NO: 10876 - protein, 8 aa, Homo sapiens
  REGION 1..8: note = Heavy chain CDR1
GFTFSSYG

SEQ ID NO: 10877 - protein, 8 aa, Homo sapiens
  REGION 1..8: note = Heavy chain CDR1
GFTFSNYG

SEQ ID NO: 10878 - protein, 8 aa, Homo sapiens
  REGION 1..8: note = Heavy chain CDR1
GYTFTSYG

SEQ ID NO: 10879 - protein, 8 aa, Homo sapiens
  REGION 1..8: note = Heavy chain CDR1
GFTFSSYG

SEQ ID NO: 10880 - protein, 8 aa, Homo sapiens
  REGION 1..8: note = Heavy chain CDR1
GFTFSSYG

SEQ ID NO: 10881 - protein, 8 aa, Homo sapiens
  REGION 1..8: note = Heavy chain CDR1
GFTFSSHG

SEQ ID NO: 10882 - protein, 8 aa, Homo sapiens
  REGION 1..8: note = Heavy chain CDR1
GFTFSSYG

SEQ ID NO: 10883 - protein, 8 aa, Homo sapiens
  REGION 1..8: note = Heavy chain CDR1
GFTFSSYG

SEQ ID NO: 10884 - protein, 8 aa, Homo sapiens
  REGION 1..8: note = Heavy chain CDR1
GYTFTSYG

SEQ ID NO: 10885 - protein, 8 aa, Homo sapiens
  REGION 1..8: note = Heavy chain CDR1
GYTFTSYG

SEQ ID NO: 10886 - protein, 8 aa, Homo sapiens
  REGION 1..8: note = Heavy chain CDR1
GFTLSSYG

SEQ ID NO: 10887 - protein, 8 aa, Homo sapiens
  REGION 1..8: note = Heavy chain CDR1
GFTFSSYG

SEQ ID NO: 10888 - protein, 8 aa, Homo sapiens
  REGION 1..8: note = Heavy chain CDR1
GFTFSSYG

SEQ ID NO: 10889 - protein, 8 aa, Homo sapiens
  REGION 1..8: note = Heavy chain CDR1
GFIFSSYG

SEQ ID NO: 10890 - protein, 8 aa, Homo sapiens
  REGION 1..8: note = Heavy chain CDR1
GFTLSSFG

SEQ ID NO: 10891 - protein, 8 aa, Homo sapiens
  REGION 1..8: note = Heavy chain CDR1
GYTFTSYG

SEQ ID NO: 10892 - protein, 8 aa, Homo sapiens
  REGION 1..8: note = Heavy chain CDR1
GFTFSSYG

SEQ ID NO: 10893 - protein, 8 aa, Homo sapiens
  REGION 1..8: note = Heavy chain CDR1
GFTFSSYG

SEQ ID NO: 10894 - protein, 8 aa, Homo sapiens
  REGION 1..8: note = Heavy chain CDR1
GFTFSRYG

SEQ ID NO: 10895 - protein, 8 aa, Homo sapiens
  REGION 1..8: note = Heavy chain CDR1
GFTFSSYG

SEQ ID NO: 10896 - protein, 8 aa, Homo sapiens
  REGION 1..8: note = Heavy chain CDR1
GFTFSSYG

SEQ ID NO: 10897 - protein, 8 aa, Homo sapiens
  REGION 1..8: note = Heavy chain CDR1
GFTFSSYG

SEQ ID NO: 10898 - protein, 8 aa, Homo sapiens
  REGION 1..8: note = Heavy chain CDR1
GYTFTNYG

SEQ ID NO: 10899 - protein, 8 aa, Homo sapiens
  REGION 1..8: note = Heavy chain CDR1
GFTFSSHG

SEQ ID NO: 10900 - protein, 8 aa, Homo sapiens
  REGION 1..8: note = Heavy chain CDR1
GFTFSSYG

SEQ ID NO: 10901 - protein, 8 aa, Homo sapiens
  REGION 1..8: note = Heavy chain CDR1
GYTFTNYG

SEQ ID NO: 10902 - protein, 8 aa, Homo sapiens
  REGION 1..8: note = Heavy chain CDR1
GFTFSSYG

SEQ ID NO: 10903 - protein, 8 aa, Homo sapiens
  REGION 1..8: note = Heavy chain CDR1
GFTFSSYG

SEQ ID NO: 10904 - protein, 8 aa, Homo sapiens
  REGION 1..8: note = Heavy chain CDR1
GYTFTNYG

SEQ ID NO: 10905 - protein, 8 aa, Homo sapiens
  REGION 1..8: note = Heavy chain CDR1
GYTFTSYG

SEQ ID NO: 10906 - protein, 8 aa, Homo sapiens
  REGION 1..8: note = Heavy chain CDR1
GFTFSSYG

SEQ ID NO: 10907 - protein, 8 aa, Homo sapiens
  REGION 1..8: note = Heavy chain CDR1
GFTFSSYG

SEQ ID NO: 10908 - protein, 8 aa, Homo sapiens
  REGION 1..8: note = Heavy chain CDR1
GFTFSSYG

SEQ ID NO: 10909 - protein, 8 aa, Homo sapiens
  REGION 1..8: note = Heavy chain CDR1
GYTFTNYG

SEQ ID NO: 10910 - protein, 8 aa, Homo sapiens
  REGION 1..8: note = Heavy chain CDR1
GYTFTSYG

SEQ ID NO: 10911 - protein, 8 aa, Homo sapiens
  REGION 1..8: note = Heavy chain CDR1
GYTFTSYG

SEQ ID NO: 10912 - protein, 8 aa, Homo sapiens
  REGION 1..8: note = Heavy chain CDR1
GFTFSSNG

SEQ ID NO: 10913 - protein, 8 aa, Homo sapiens
  REGION 1..8: note = Heavy chain CDR1
GFTFSSYG

SEQ ID NO: 10914 - protein, 8 aa, Homo sapiens
  REGION 1..8: note = Heavy chain CDR1
GFTFSSYG

SEQ ID NO: 10915 - protein, 8 aa, Homo sapiens
  REGION 1..8: note = Heavy chain CDR1
GYTFTSYG

SEQ ID NO: 10916 - protein, 8 aa, Homo sapiens
  REGION 1..8: note = Heavy chain CDR1
GFTFSRYG

SEQ ID NO: 10917 - protein, 8 aa, Homo sapiens
  REGION 1..8: note = Heavy chain CDR1
GYTFTNYG

SEQ ID NO: 10918 - protein, 8 aa, Homo sapiens
  REGION 1..8: note = Heavy chain CDR1
GFNFSSYG

SEQ ID NO: 10919 - protein, 8 aa, Homo sapiens
  REGION 1..8: note = Heavy chain CDR1
GFTFSSYG

SEQ ID NO: 10920 - protein, 8 aa, Homo sapiens
  REGION 1..8: note = Heavy chain CDR1
GYTFTSYG

SEQ ID NO: 10921 - protein, 8 aa, Homo sapiens
  REGION 1..8: note = Heavy chain CDR1
GFTFSSYG

SEQ ID NO: 10922 - protein, 8 aa, Homo sapiens
  REGION 1..8: note = Heavy chain CDR1
GFTFSSYG

SEQ ID NO: 10923 - protein, 8 aa, Homo sapiens
  REGION 1..8: note = Heavy chain CDR1
GFTFSSYG

SEQ ID NO: 10924 - protein, 8 aa, Homo sapiens
  REGION 1..8: note = Heavy chain CDR1
GFTFSSYG

SEQ ID NO: 10925 - protein, 8 aa, Homo sapiens
  REGION 1..8: note = Heavy chain CDR1
GFTFRSYG

SEQ ID NO: 10926 - protein, 8 aa, Homo sapiens
  REGION 1..8: note = Heavy chain CDR1
GFTFSSHG

SEQ ID NO: 10927 - protein, 8 aa, Homo sapiens
  REGION 1..8: note = Heavy chain CDR1
GFTFSSYG

SEQ ID NO: 10928 - protein, 8 aa, Homo sapiens
  REGION 1..8: note = Heavy chain CDR1
GFTFSSYG

SEQ ID NO: 10929 - protein, 8 aa, Homo sapiens
  REGION 1..8: note = Heavy chain CDR1
GFTFSRYG

SEQ ID NO: 10930 - protein, 8 aa, Homo sapiens
  REGION 1..8: note = Heavy chain CDR1
GFTFSSYG

SEQ ID NO: 10931 - protein, 8 aa, Homo sapiens
  REGION 1..8: note = Heavy chain CDR1
GFTFSNYG

SEQ ID NO: 10932 - protein, 8 aa, Homo sapiens
  REGION 1..8: note = Heavy chain CDR1
GFTFSSYG

SEQ ID NO: 10933 - protein, 8 aa, Homo sapiens
  REGION 1..8: note = Heavy chain CDR1
GFTLSNYG

SEQ ID NO: 10934 - protein, 8 aa, Homo sapiens
  REGION 1..8: note = Heavy chain CDR1
GFTFSSYG

SEQ ID NO: 10935 - protein, 8 aa, Homo sapiens
  REGION 1..8: note = Heavy chain CDR1
GYTFTSYG

SEQ ID NO: 10936 - protein, 8 aa, Homo sapiens
  REGION 1..8: note = Heavy chain CDR1
GFTFSNYG

SEQ ID NO: 10937 - protein, 8 aa, Homo sapiens
  REGION 1..8: note = Heavy chain CDR1
GFTFSSYG

SEQ ID NO: 10938 - protein, 8 aa, Homo sapiens
  REGION 1..8: note = Heavy chain CDR1
GFTFSSFG

SEQ ID NO: 10939 - protein, 8 aa, Homo sapiens
  REGION 1..8: note = Heavy chain CDR1
GFTFSSYG

SEQ ID NO: 10940 - protein, 8 aa, Homo sapiens
  REGION 1..8: note = Heavy chain CDR1
GYTFTSYY

SEQ ID NO: 10941 - protein, 8 aa, Homo sapiens
  REGION 1..8: note = Heavy chain CDR1
GYTFTSYY

SEQ ID NO: 10942 - protein, 10 aa, Homo sapiens
  REGION 1..10: note = Heavy chain CDR1
GGSISSSSYY

SEQ ID NO: 10943 - protein, 8 aa, Homo sapiens
  REGION 1..8: note = Heavy chain CDR1
GFTLSNYG

SEQ ID NO: 10944 - protein, 8 aa, Homo sapiens
  REGION 1..8: note = Heavy chain CDR1
GFTFSSYG

SEQ ID NO: 10945 - protein, 8 aa, Homo sapiens
  REGION 1..8: note = Heavy chain CDR1
GFTFSSYG

SEQ ID NO: 10946 - protein, 8 aa, Homo sapiens
  REGION 1..8: note = Heavy chain CDR1
GFTFSSYG

SEQ ID NO: 10947 - protein, 8 aa, Homo sapiens
  REGION 1..8: note = Heavy chain CDR1
GFTFSSYG

SEQ ID NO: 10948 - protein, 8 aa, Homo sapiens
  REGION 1..8: note = Heavy chain CDR1
GFTFSSYG

SEQ ID NO: 10949 - protein, 8 aa, Homo sapiens
  REGION 1..8: note = Heavy chain CDR1
GFTFSNYG

SEQ ID NO: 10950 - protein, 8 aa, Homo sapiens
  REGION 1..8: note = Heavy chain CDR1
GYTFTSYG

SEQ ID NO: 10951 - protein, 8 aa, Homo sapiens
  REGION 1..8: note = Heavy chain CDR1
GFTFSSYG

SEQ ID NO: 10952 - protein, 8 aa, Homo sapiens
  REGION 1..8: note = Heavy chain CDR1
GFTFSSYG

SEQ ID NO: 10953 - protein, 8 aa, Homo sapiens
  REGION 1..8: note = Heavy chain CDR1
GFTFSSYG

SEQ ID NO: 10954 - protein, 8 aa, Homo sapiens
  REGION 1..8: note = Heavy chain CDR1
GFTFSSYG

SEQ ID NO: 10955 - protein, 8 aa, Homo sapiens
  REGION 1..8: note = Heavy chain CDR1
GFTFSRYG

SEQ ID NO: 10956 - protein, 8 aa, Homo sapiens
  REGION 1..8: note = Heavy chain CDR1
GFTFSSYG

SEQ ID NO: 10957 - protein, 10 aa, Homo sapiens
  REGION 1..10: note = Heavy chain CDR1
GGSISSSSYY

SEQ ID NO: 10958 - protein, 8 aa, Homo sapiens
  REGION 1..8: note = Heavy chain CDR1
GFTFSSYG

SEQ ID NO: 10959 - protein, 8 aa, Homo sapiens
  REGION 1..8: note = Heavy chain CDR1
GYTFTSYG

SEQ ID NO: 10960 - protein, 8 aa, Homo sapiens
  REGION 1..8: note = Heavy chain CDR1
GFTFSSYG

SEQ ID NO: 10961 - protein, 8 aa, Homo sapiens
  REGION 1..8: note = Heavy chain CDR1
GYTFTSYG

SEQ ID NO: 10962 - protein, 8 aa, Homo sapiens
  REGION 1..8: note = Heavy chain CDR1
GFTFSSYG

SEQ ID NO: 10963 - protein, 8 aa, Homo sapiens
  REGION 1..8: note = Heavy chain CDR1
GFTLSNYG

SEQ ID NO: 10964 - protein, 8 aa, Homo sapiens
  REGION 1..8: note = Heavy chain CDR1
GFTFSSHG

SEQ ID NO: 10965 - protein, 8 aa, Homo sapiens
  REGION 1..8: note = Heavy chain CDR1
GFTFSSYG

SEQ ID NO: 10966 - protein, 8 aa, Homo sapiens
  REGION 1..8: note = Heavy chain CDR1
GFTLSNYG

SEQ ID NO: 10967 - protein, 10 aa, Homo sapiens
  REGION 1..10: note = Heavy chain CDR1
GGSISSSSYY

SEQ ID NO: 10968 - protein, 8 aa, Homo sapiens
  REGION 1..8: note = Heavy chain CDR1
GYTFTSYG

SEQ ID NO: 10969 - protein, 8 aa, Homo sapiens
  REGION 1..8: note = Heavy chain CDR1
GFTLSNYG

SEQ ID NO: 10970 - protein, 8 aa, Homo sapiens
  REGION 1..8: note = Heavy chain CDR1
GFTFSNYG

SEQ ID NO: 10971 - protein, 8 aa, Homo sapiens
  REGION 1..8: note = Heavy chain CDR1
GFTFSSYG

SEQ ID NO: 10972 - protein, 8 aa, Homo sapiens
  REGION 1..8: note = Heavy chain CDR1
GFTFSRYG

SEQ ID NO: 10973 - protein, 8 aa, Homo sapiens
  REGION 1..8: note = Heavy chain CDR1
GFTFSNYG

SEQ ID NO: 10974 - protein, 8 aa, Homo sapiens
  REGION 1..8: note = Heavy chain CDR1
GFTFSRYG

SEQ ID NO: 10975 - protein, 8 aa, Homo sapiens
  REGION 1..8: note = Heavy chain CDR1
GFTFSRYG

SEQ ID NO: 10976 - protein, 7 aa, Homo sapiens
  REGION 1..7: note = Heavy chain CDR2
IYYTGST

SEQ ID NO: 10977 - protein, 7 aa, Homo sapiens
  REGION 1..7: note = Heavy chain CDR2
IYYSGNT

SEQ ID NO: 10978 - protein, 7 aa, Homo sapiens
  REGION 1..7: note = Heavy chain CDR2
IYYSGNT

SEQ ID NO: 10979 - protein, 7 aa, Homo sapiens
  REGION 1..7: note = Heavy chain CDR2
IYYSGNT

SEQ ID NO: 10980 - protein, 8 aa, Homo sapiens
  REGION 1..8: note = Heavy chain CDR2
ISYDGSNK

SEQ ID NO: 10981 - protein, 7 aa, Homo sapiens
  REGION 1..7: note = Heavy chain CDR2
IYYSGNT

SEQ ID NO: 10982 - protein, 7 aa, Homo sapiens
  REGION 1..7: note = Heavy chain CDR2
IYYSGNT

SEQ ID NO: 10983 - protein, 7 aa, Homo sapiens
  REGION 1..7: note = Heavy chain CDR2
IYYSGST

SEQ ID NO: 10984 - protein, 10 aa, Homo sapiens
  REGION 1..10: note = Heavy chain CDR2
IKSKTDGGTT

SEQ ID NO: 10985 - protein, 8 aa, Homo sapiens
  REGION 1..8: note = Heavy chain CDR2
ISAYNGNT

SEQ ID NO: 10986 - protein, 7 aa, Homo sapiens
  REGION 1..7: note = Heavy chain CDR2
IYYSGNT

SEQ ID NO: 10987 - protein, 8 aa, Homo sapiens
  REGION 1..8: note = Heavy chain CDR2
INWNGGST

SEQ ID NO: 10988 - protein, 7 aa, Homo sapiens
  REGION 1..7: note = Heavy chain CDR2
IYYSGNT

SEQ ID NO: 10989 - protein, 8 aa, Homo sapiens
  REGION 1..8: note = Heavy chain CDR2
INWNGGST

SEQ ID NO: 10990 - protein, 7 aa, Homo sapiens
  REGION 1..7: note = Heavy chain CDR2
IYYSGNT

SEQ ID NO: 10991 - protein, 7 aa, Homo sapiens
  REGION 1..7: note = Heavy chain CDR2
IYYSGNT

SEQ ID NO: 10992 - protein, 8 aa, Homo sapiens
  REGION 1..8: note = Heavy chain CDR2
IWYDGSNK

SEQ ID NO: 10993 - protein, 10 aa, Homo sapiens
  REGION 1..10: note = Heavy chain CDR2
IKSKTDGGTT

SEQ ID NO: 10994 - protein, 7 aa, Homo sapiens
  REGION 1..7: note = Heavy chain CDR2
IYYSGNT

SEQ ID NO: 10995 - protein, 7 aa, Homo sapiens
  REGION 1..7: note = Heavy chain CDR2
IYYTGST

SEQ ID NO: 10996 - protein, 7 aa, Homo sapiens
  REGION 1..7: note = Heavy chain CDR2
IYYTGST

SEQ ID NO: 10997 - protein, 8 aa, Homo sapiens
  REGION 1..8: note = Heavy chain CDR2
ISAYNGNT

SEQ ID NO: 10998 - protein, 10 aa, Homo sapiens
  REGION 1..10: note = Heavy chain CDR2
IKSKTDGGTT

SEQ ID NO: 10999 - protein, 7 aa, Homo sapiens
  REGION 1..7: note = Heavy chain CDR2
IYYTGST

SEQ ID NO: 11000 - protein, 8 aa, Homo sapiens
  REGION 1..8: note = Heavy chain CDR2
ISAYNGNT

SEQ ID NO: 11001 - protein, 7 aa, Homo sapiens
  REGION 1..7: note = Heavy chain CDR2
IYYTGST

SEQ ID NO: 11002 - protein, 8 aa, Homo sapiens
  REGION 1..8: note = Heavy chain CDR2
INWNGGST

SEQ ID NO: 11003 - protein, 8 aa, Homo sapiens
  REGION 1..8: note = Heavy chain CDR2
IWYDGSNK

SEQ ID NO: 11004 - protein, 8 aa, Homo sapiens
  REGION 1..8: note = Heavy chain CDR2
INWNGGST

SEQ ID NO: 11005 - protein, 7 aa, Homo sapiens
  REGION 1..7: note = Heavy chain CDR2
IYYTGST

SEQ ID NO: 11006 - protein, 7 aa, Homo sapiens
  REGION 1..7: note = Heavy chain CDR2
MYYSGST

SEQ ID NO: 11007 - protein, 8 aa, Homo sapiens
  REGION 1..8: note = Heavy chain CDR2
ISAYNGNT

SEQ ID NO: 11008 - protein, 7 aa, Homo sapiens
  REGION 1..7: note = Heavy chain CDR2
IYYTGST

SEQ ID NO: 11009 - protein, 7 aa, Homo sapiens
  REGION 1..7: note = Heavy chain CDR2
IYYTGST

SEQ ID NO: 11010 - protein, 8 aa, Homo sapiens
  REGION 1..8: note = Heavy chain CDR2
IWHDGSNK

SEQ ID NO: 11011 - protein, 8 aa, Homo sapiens
  REGION 1..8: note = Heavy chain CDR2
ISAYNGNT

SEQ ID NO: 11012 - protein, 7 aa, Homo sapiens
  REGION 1..7: note = Heavy chain CDR2
IYYSGNT

SEQ ID NO: 11013 - protein, 7 aa, Homo sapiens
  REGION 1..7: note = Heavy chain CDR2
IYYTGST

SEQ ID NO: 11014 - protein, 10 aa, Homo sapiens
  REGION 1..10: note = Heavy chain CDR2
IKSKTDGGTT

SEQ ID NO: 11015 - protein, 8 aa, Homo sapiens
  REGION 1..8: note = Heavy chain CDR2
INWNGGST

SEQ ID NO: 11016 - protein, 7 aa, Homo sapiens
  REGION 1..7: note = Heavy chain CDR2
IYYSGNT

SEQ ID NO: 11017 - protein, 7 aa, Homo sapiens
  REGION 1..7: note = Heavy chain CDR2
IYYSGNT

SEQ ID NO: 11018 - protein, 7 aa, Homo sapiens
  REGION 1..7: note = Heavy chain CDR2
IYYTGST

SEQ ID NO: 11019 - protein, 7 aa, Homo sapiens
  REGION 1..7: note = Heavy chain CDR2
IYYSGNT

SEQ ID NO: 11020 - protein, 8 aa, Homo sapiens
  REGION 1..8: note = Heavy chain CDR2
INWNGGST

SEQ ID NO: 11021 - protein, 8 aa, Homo sapiens
  REGION 1..8: note = Heavy chain CDR2
INWNGGST

SEQ ID NO: 11022 - protein, 8 aa, Homo sapiens
  REGION 1..8: note = Heavy chain CDR2
IWYDGNNK

SEQ ID NO: 11023 - protein, 8 aa, Homo sapiens
  REGION 1..8: note = Heavy chain CDR2
IWYDGNNK

SEQ ID NO: 11024 - protein, 8 aa, Homo sapiens
  REGION 1..8: note = Heavy chain CDR2
IWYDGRNK

SEQ ID NO: 11025 - protein, 8 aa, Homo sapiens
  REGION 1..8: note = Heavy chain CDR2
IWYDGSNK

SEQ ID NO: 11026 - protein, 7 aa, Homo sapiens
  REGION 1..7: note = Heavy chain CDR2
IYYSGHT

SEQ ID NO: 11027 - protein, 8 aa, Homo sapiens
  REGION 1..8: note = Heavy chain CDR2
IFNDGNNK

SEQ ID NO: 11028 - protein, 8 aa, Homo sapiens
  REGION 1..8: note = Heavy chain CDR2
TWYDGSNK

SEQ ID NO: 11029 - protein, 8 aa, Homo sapiens
  REGION 1..8: note = Heavy chain CDR2
IWYDGSNK

SEQ ID NO: 11030 - protein, 8 aa, Homo sapiens
  REGION 1..8: note = Heavy chain CDR2
IWYDGNNK

SEQ ID NO: 11031 - protein, 8 aa, Homo sapiens
  REGION 1..8: note = Heavy chain CDR2
TWYDGSNK

SEQ ID NO: 11032 - protein, 8 aa, Homo sapiens
  REGION 1..8: note = Heavy chain CDR2
IWYDGNNK

SEQ ID NO: 11033 - protein, 8 aa, Homo sapiens
  REGION 1..8: note = Heavy chain CDR2
IWYDGSNK

SEQ ID NO: 11034 - protein, 8 aa, Homo sapiens
  REGION 1..8: note = Heavy chain CDR2
IWYDGNNK

SEQ ID NO: 11035 - protein, 8 aa, Homo sapiens
  REGION 1..8: note = Heavy chain CDR2
IFNDGNNK

SEQ ID NO: 11036 - protein, 8 aa, Homo sapiens
  REGION 1..8: note = Heavy chain CDR2
IWYDGNNK

SEQ ID NO: 11037 - protein, 8 aa, Homo sapiens
  REGION 1..8: note = Heavy chain CDR2
IWYGGSNK

SEQ ID NO: 11038 - protein, 8 aa, Homo sapiens
  REGION 1..8: note = Heavy chain CDR2
IWYDGNNR

SEQ ID NO: 11039 - protein, 8 aa, Homo sapiens
  REGION 1..8: note = Heavy chain CDR2
IWYDGSNK

SEQ ID NO: 11040 - protein, 8 aa, Homo sapiens
  REGION 1..8: note = Heavy chain CDR2
TWYDGSNK

SEQ ID NO: 11041 - protein, 8 aa, Homo sapiens
  REGION 1..8: note = Heavy chain CDR2
IWYDGSNK

SEQ ID NO: 11042 - protein, 8 aa, Homo sapiens
  REGION 1..8: note = Heavy chain CDR2
IWYDGRNK

SEQ ID NO: 11043 - protein, 8 aa, Homo sapiens
  REGION 1..8: note = Heavy chain CDR2
IWYDGSNK

SEQ ID NO: 11044 - protein, 8 aa, Homo sapiens
  REGION 1..8: note = Heavy chain CDR2
IWYDGNNK

SEQ ID NO: 11045 - protein, 8 aa, Homo sapiens
  REGION 1..8: note = Heavy chain CDR2
IWYDGNNK

SEQ ID NO: 11046 - protein, 8 aa, Homo sapiens
  REGION 1..8: note = Heavy chain CDR2
IWYDGSNK

SEQ ID NO: 11047 - protein, 8 aa, Homo sapiens
  REGION 1..8: note = Heavy chain CDR2
IWYDGNNK

SEQ ID NO: 11048 - protein, 8 aa, Homo sapiens
  REGION 1..8: note = Heavy chain CDR2
IWYDGNNK

SEQ ID NO: 11049 - protein, 8 aa, Homo sapiens
  REGION 1..8: note = Heavy chain CDR2
IWYDGSNK

SEQ ID NO: 11050 - protein, 8 aa, Homo sapiens
  REGION 1..8: note = Heavy chain CDR2
IWYDGSNK

SEQ ID NO: 11051 - protein, 8 aa, Homo sapiens
  REGION 1..8: note = Heavy chain CDR2
IWYDGNNK

SEQ ID NO: 11052 - protein, 8 aa, Homo sapiens
  REGION 1..8: note = Heavy chain CDR2
IWYDGNNK

SEQ ID NO: 11053 - protein, 8 aa, Homo sapiens
  REGION 1..8: note = Heavy chain CDR2
VWYDGSNK

SEQ ID NO: 11054 - protein, 8 aa, Homo sapiens
  REGION 1..8: note = Heavy chain CDR2
IWYDGNNK

SEQ ID NO: 11055 - protein, 8 aa, Homo sapiens
  REGION 1..8: note = Heavy chain CDR2
IWYDGRNK

SEQ ID NO: 11056 - protein, 8 aa, Homo sapiens
  REGION 1..8: note = Heavy chain CDR2
IWYDGSNK

SEQ ID NO: 11057 - protein, 8 aa, Homo sapiens
  REGION 1..8: note = Heavy chain CDR2
IWDDGRNK

SEQ ID NO: 11058 - protein, 8 aa, Homo sapiens
  REGION 1..8: note = Heavy chain CDR2
IWYDGSNK

SEQ ID NO: 11059 - protein, 8 aa, Homo sapiens
  REGION 1..8: note = Heavy chain CDR2
IWYDGSNK

SEQ ID NO: 11060 - protein, 8 aa, Homo sapiens
  REGION 1..8: note = Heavy chain CDR2
IWDDGRNK

SEQ ID NO: 11061 - protein, 8 aa, Homo sapiens
  REGION 1..8: note = Heavy chain CDR2
LWYDGSNK

SEQ ID NO: 11062 - protein, 8 aa, Homo sapiens
  REGION 1..8: note = Heavy chain CDR2
IWDDGRNK

SEQ ID NO: 11063 - protein, 7 aa, Homo sapiens
  REGION 1..7: note = Heavy chain CDR2
IYYSGST

SEQ ID NO: 11064 - protein, 7 aa, Homo sapiens
  REGION 1..7: note = Heavy chain CDR2
IYYSGST

SEQ ID NO: 11065 - protein, 8 aa, Homo sapiens
  REGION 1..8: note = Heavy chain CDR2
IWYDGSNK

SEQ ID NO: 11066 - protein, 8 aa, Homo sapiens
  REGION 1..8: note = Heavy chain CDR2
IWYDGRNK

SEQ ID NO: 11067 - protein, 8 aa, Homo sapiens
  REGION 1..8: note = Heavy chain CDR2
IWYDGSNK

SEQ ID NO: 11068 - protein, 7 aa, Homo sapiens
  REGION 1..7: note = Heavy chain CDR2
IYYSGST

SEQ ID NO: 11069 - protein, 8 aa, Homo sapiens
  REGION 1..8: note = Heavy chain CDR2
IWDDGINK

SEQ ID NO: 11070 - protein, 8 aa, Homo sapiens
  REGION 1..8: note = Heavy chain CDR2
IWYDGSNK

SEQ ID NO: 11071 - protein, 7 aa, Homo sapiens
  REGION 1..7: note = Heavy chain CDR2
IYYSGST

SEQ ID NO: 11072 - protein, 8 aa, Homo sapiens
  REGION 1..8: note = Heavy chain CDR2
IWYDGSNK

SEQ ID NO: 11073 - protein, 8 aa, Homo sapiens
  REGION 1..8: note = Heavy chain CDR2
IWYDGSNK

SEQ ID NO: 11074 - protein, 7 aa, Homo sapiens
  REGION 1..7: note = Heavy chain CDR2
IYYSGST

SEQ ID NO: 11075 - protein, 8 aa, Homo sapiens
  REGION 1..8: note = Heavy chain CDR2
IWYDGSNK

SEQ ID NO: 11076 - protein, 8 aa, Homo sapiens
  REGION 1..8: note = Heavy chain CDR2
IWYDGSNK

SEQ ID NO: 11077 - protein, 8 aa, Homo sapiens
  REGION 1..8: note = Heavy chain CDR2
IWYDGSNK

SEQ ID NO: 11078 - protein, 8 aa, Homo sapiens
  REGION 1..8: note = Heavy chain CDR2
IGYDGSDK

SEQ ID NO: 11079 - protein, 7 aa, Homo sapiens
  REGION 1..7: note = Heavy chain CDR2
IYYSGST

SEQ ID NO: 11080 - protein, 7 aa, Homo sapiens
  REGION 1..7: note = Heavy chain CDR2
IYYSGST

SEQ ID NO: 11081 - protein, 8 aa, Homo sapiens
  REGION 1..8: note = Heavy chain CDR2
IWYDGSNK

SEQ ID NO: 11082 - protein, 10 aa, Homo sapiens
  REGION 1..10: note = Heavy chain CDR2
IRRKAYGGTT

SEQ ID NO: 11083 - protein, 7 aa, Homo sapiens
  REGION 1..7: note = Heavy chain CDR2
IYYSGST

SEQ ID NO: 11084 - protein, 7 aa, Homo sapiens
  REGION 1..7: note = Heavy chain CDR2
IYYSGST

SEQ ID NO: 11085 - protein, 7 aa, Homo sapiens
  REGION 1..7: note = Heavy chain CDR2
IYYSGST

SEQ ID NO: 11086 - protein, 8 aa, Homo sapiens
  REGION 1..8: note = Heavy chain CDR2
IWYDGSNK

SEQ ID NO: 11087 - protein, 7 aa, Homo sapiens
  REGION 1..7: note = Heavy chain CDR2
IYYSGST

SEQ ID NO: 11088 - protein, 7 aa, Homo sapiens
  REGION 1..7: note = Heavy chain CDR2
IYYSGST

SEQ ID NO: 11089 - protein, 8 aa, Homo sapiens
  REGION 1..8: note = Heavy chain CDR2
IWDDGRNK

SEQ ID NO: 11090 - protein, 8 aa, Homo sapiens
  REGION 1..8: note = Heavy chain CDR2
IWYDGSNK

SEQ ID NO: 11091 - protein, 8 aa, Homo sapiens
  REGION 1..8: note = Heavy chain CDR2
IWYDGSNK

SEQ ID NO: 11092 - protein, 8 aa, Homo sapiens
  REGION 1..8: note = Heavy chain CDR2
IWYDGSNK

SEQ ID NO: 11093 - protein, 8 aa, Homo sapiens
  REGION 1..8: note = Heavy chain CDR2
IWYDGSNK

SEQ ID NO: 11094 - protein, 7 aa, Homo sapiens
  REGION 1..7: note = Heavy chain CDR2
IYYSGST

SEQ ID NO: 11095 - protein, 8 aa, Homo sapiens
  REGION 1..8: note = Heavy chain CDR2
IWDDGKNK

SEQ ID NO: 11096 - protein, 8 aa, Homo sapiens
  REGION 1..8: note = Heavy chain CDR2
IWYDGSNK

SEQ ID NO: 11097 - protein, 8 aa, Homo sapiens
  REGION 1..8: note = Heavy chain CDR2
IWDDGKNK

SEQ ID NO: 11098 - protein, 7 aa, Homo sapiens
  REGION 1..7: note = Heavy chain CDR2
IYYSGST

SEQ ID NO: 11099 - protein, 8 aa, Homo sapiens
  REGION 1..8: note = Heavy chain CDR2
IWYDGSNK

SEQ ID NO: 11100 - protein, 8 aa, Homo sapiens
  REGION 1..8: note = Heavy chain CDR2
IWYDGSNK

SEQ ID NO: 11101 - protein, 7 aa, Homo sapiens
  REGION 1..7: note = Heavy chain CDR2
IYYSGST

SEQ ID NO: 11102 - protein, 7 aa, Homo sapiens
  REGION 1..7: note = Heavy chain CDR2
IYYSGST

SEQ ID NO: 11103 - protein, 8 aa, Homo sapiens
  REGION 1..8: note = Heavy chain CDR2
IWDDGRNK

SEQ ID NO: 11104 - protein, 7 aa, Homo sapiens
  REGION 1..7: note = Heavy chain CDR2
IYYSGST

SEQ ID NO: 11105 - protein, 8 aa, Homo sapiens
  REGION 1..8: note = Heavy chain CDR2
IWDDGRNK

SEQ ID NO: 11106 - protein, 8 aa, Homo sapiens
  REGION 1..8: note = Heavy chain CDR2
IWYDGSNK

SEQ ID NO: 11107 - protein, 8 aa, Homo sapiens
  REGION 1..8: note = Heavy chain CDR2
IWYDGRNK

SEQ ID NO: 11108 - protein, 8 aa, Homo sapiens
  REGION 1..8: note = Heavy chain CDR2
INWNGGST

SEQ ID NO: 11109 - protein, 8 aa, Homo sapiens
  REGION 1..8: note = Heavy chain CDR2
INWNGGST

SEQ ID NO: 11110 - protein, 8 aa, Homo sapiens
  REGION 1..8: note = Heavy chain CDR2
ISAYNGNT

SEQ ID NO: 11111 - protein, 8 aa, Homo sapiens
  REGION 1..8: note = Heavy chain CDR2
INWNGGNT

SEQ ID NO: 11112 - protein, 8 aa, Homo sapiens
  REGION 1..8: note = Heavy chain CDR2
ISAYNGNT

SEQ ID NO: 11113 - protein, 8 aa, Homo sapiens
  REGION 1..8: note = Heavy chain CDR2
ISVYNGNT

SEQ ID NO: 11114 - protein, 8 aa, Homo sapiens
  REGION 1..8: note = Heavy chain CDR2
IWYDGRNK

SEQ ID NO: 11115 - protein, 8 aa, Homo sapiens
  REGION 1..8: note = Heavy chain CDR2
IWYDGRNK

SEQ ID NO: 11116 - protein, 8 aa, Homo sapiens
  REGION 1..8: note = Heavy chain CDR2
INPSGGSS

SEQ ID NO: 11117 - protein, 8 aa, Homo sapiens
  REGION 1..8: note = Heavy chain CDR2
IWNDGSNK

SEQ ID NO: 11118 - protein, 8 aa, Homo sapiens
  REGION 1..8: note = Heavy chain CDR2
IWYDGRNK

SEQ ID NO: 11119 - protein, 8 aa, Homo sapiens
  REGION 1..8: note = Heavy chain CDR2
INPSGGSS

SEQ ID NO: 11120 - protein, 8 aa, Homo sapiens
  REGION 1..8: note = Heavy chain CDR2
ILYDGSNK

SEQ ID NO: 11121 - protein, 8 aa, Homo sapiens
  REGION 1..8: note = Heavy chain CDR2
IWYDGSNK

SEQ ID NO: 11122 - protein, 8 aa, Homo sapiens
  REGION 1..8: note = Heavy chain CDR2
IWYDGSNK

SEQ ID NO: 11123 - protein, 8 aa, Homo sapiens
  REGION 1..8: note = Heavy chain CDR2
IFYDGSNK

SEQ ID NO: 11124 - protein, 8 aa, Homo sapiens
  REGION 1..8: note = Heavy chain CDR2
ISAYNGNT

SEQ ID NO: 11125 - protein, 8 aa, Homo sapiens
  REGION 1..8: note = Heavy chain CDR2
IWYDGRNK

SEQ ID NO: 11126 - protein, 8 aa, Homo sapiens
  REGION 1..8: note = Heavy chain CDR2
ISAYNGNT

SEQ ID NO: 11127 - protein, 8 aa, Homo sapiens
  REGION 1..8: note = Heavy chain CDR2
ISAYNGNT

SEQ ID NO: 11128 - protein, 8 aa, Homo sapiens
  REGION 1..8: note = Heavy chain CDR2
IWYDGRNK

SEQ ID NO: 11129 - protein, 8 aa, Homo sapiens
  REGION 1..8: note = Heavy chain CDR2
INWNGGST

SEQ ID NO: 11130 - protein, 8 aa, Homo sapiens
  REGION 1..8: note = Heavy chain CDR2
INWNGGST

SEQ ID NO: 11131 - protein, 10 aa, Homo sapiens
  REGION 1..10: note = Heavy chain CDR2
IKSKTDGGTI

SEQ ID NO: 11132 - protein, 8 aa, Homo sapiens
  REGION 1..8: note = Heavy chain CDR2
IWNDGSNR

SEQ ID NO: 11133 - protein, 8 aa, Homo sapiens
  REGION 1..8: note = Heavy chain CDR2
IWYDGSNK

SEQ ID NO: 11134 - protein, 8 aa, Homo sapiens
  REGION 1..8: note = Heavy chain CDR2
IWNDGSNK

SEQ ID NO: 11135 - protein, 8 aa, Homo sapiens
  REGION 1..8: note = Heavy chain CDR2
INWNGGST

SEQ ID NO: 11136 - protein, 8 aa, Homo sapiens
  REGION 1..8: note = Heavy chain CDR2
IWNDGSNK

SEQ ID NO: 11137 - protein, 8 aa, Homo sapiens
  REGION 1..8: note = Heavy chain CDR2
IWYDGSNR

SEQ ID NO: 11138 - protein, 8 aa, Homo sapiens
  REGION 1..8: note = Heavy chain CDR2
IWNDGSNK

SEQ ID NO: 11139 - protein, 8 aa, Homo sapiens
  REGION 1..8: note = Heavy chain CDR2
IWYDGRNK

SEQ ID NO: 11140 - protein, 8 aa, Homo sapiens
  REGION 1..8: note = Heavy chain CDR2
IWYDGTIK

SEQ ID NO: 11141 - protein, 8 aa, Homo sapiens
  REGION 1..8: note = Heavy chain CDR2
IWYDGRNK

SEQ ID NO: 11142 - protein, 8 aa, Homo sapiens
  REGION 1..8: note = Heavy chain CDR2
IWYDGRNK

SEQ ID NO: 11143 - protein, 8 aa, Homo sapiens
  REGION 1..8: note = Heavy chain CDR2
IWYDGRNK

SEQ ID NO: 11144 - protein, 8 aa, Homo sapiens
  REGION 1..8: note = Heavy chain CDR2
INWNGGST

SEQ ID NO: 11145 - protein, 8 aa, Homo sapiens
  REGION 1..8: note = Heavy chain CDR2
ISVYNGNT

SEQ ID NO: 11146 - protein, 8 aa, Homo sapiens
  REGION 1..8: note = Heavy chain CDR2
INWNGGST

SEQ ID NO: 11147 - protein, 8 aa, Homo sapiens
  REGION 1..8: note = Heavy chain CDR2
IWYDGRNK

SEQ ID NO: 11148 - protein, 8 aa, Homo sapiens
  REGION 1..8: note = Heavy chain CDR2
IWYDGRNK

SEQ ID NO: 11149 - protein, 8 aa, Homo sapiens
  REGION 1..8: note = Heavy chain CDR2
ISAYNGNT

SEQ ID NO: 11150 - protein, 8 aa, Homo sapiens
  REGION 1..8: note = Heavy chain CDR2
IWYDGRNK

SEQ ID NO: 11151 - protein, 8 aa, Homo sapiens
  REGION 1..8: note = Heavy chain CDR2
IWYDGRNK

SEQ ID NO: 11152 - protein, 8 aa, Homo sapiens
  REGION 1..8: note = Heavy chain CDR2
INWNGGTT

SEQ ID NO: 11153 - protein, 8 aa, Homo sapiens
  REGION 1..8: note = Heavy chain CDR2
IWYDGSNK

SEQ ID NO: 11154 - protein, 8 aa, Homo sapiens
  REGION 1..8: note = Heavy chain CDR2
IWYDGSNK

SEQ ID NO: 11155 - protein, 8 aa, Homo sapiens
  REGION 1..8: note = Heavy chain CDR2
IWYDGRNK

SEQ ID NO: 11156 - protein, 8 aa, Homo sapiens
  REGION 1..8: note = Heavy chain CDR2
INWNGGST

SEQ ID NO: 11157 - protein, 8 aa, Homo sapiens
  REGION 1..8: note = Heavy chain CDR2
INWNGGST

SEQ ID NO: 11158 - protein, 8 aa, Homo sapiens
  REGION 1..8: note = Heavy chain CDR2
IWYDGSNK

SEQ ID NO: 11159 - protein, 8 aa, Homo sapiens
  REGION 1..8: note = Heavy chain CDR2
ISAYNGNT

SEQ ID NO: 11160 - protein, 10 aa, Homo sapiens
  REGION 1..10: note = Heavy chain CDR2
IKSKTDGGTI

SEQ ID NO: 11161 - protein, 8 aa, Homo sapiens
  REGION 1..8: note = Heavy chain CDR2
VNPSGGTS

SEQ ID NO: 11162 - protein, 8 aa, Homo sapiens
  REGION 1..8: note = Heavy chain CDR2
VNPSSGST

SEQ ID NO: 11163 - protein, 8 aa, Homo sapiens
  REGION 1..8: note = Heavy chain CDR2
ISVYNGNT

SEQ ID NO: 11164 - protein, 8 aa, Homo sapiens
  REGION 1..8: note = Heavy chain CDR2
IWYDGRNK

SEQ ID NO: 11165 - protein, 8 aa, Homo sapiens
  REGION 1..8: note = Heavy chain CDR2
IFYDGSNN

SEQ ID NO: 11166 - protein, 8 aa, Homo sapiens
  REGION 1..8: note = Heavy chain CDR2
INWNGGNT

SEQ ID NO: 11167 - protein, 8 aa, Homo sapiens
  REGION 1..8: note = Heavy chain CDR2
VNPSSGST

SEQ ID NO: 11168 - protein, 8 aa, Homo sapiens
  REGION 1..8: note = Heavy chain CDR2
INWNGGNT

SEQ ID NO: 11169 - protein, 8 aa, Homo sapiens
  REGION 1..8: note = Heavy chain CDR2
ISAYNGNT

SEQ ID NO: 11170 - protein, 8 aa, Homo sapiens
  REGION 1..8: note = Heavy chain CDR2
INPSGGST

SEQ ID NO: 11171 - protein, 8 aa, Homo sapiens
  REGION 1..8: note = Heavy chain CDR2
IWNDGSNR

SEQ ID NO: 11172 - protein, 8 aa, Homo sapiens
  REGION 1..8: note = Heavy chain CDR2
IWYDGNHK

SEQ ID NO: 11173 - protein, 8 aa, Homo sapiens
  REGION 1..8: note = Heavy chain CDR2
IWYDGRNK

SEQ ID NO: 11174 - protein, 8 aa, Homo sapiens
  REGION 1..8: note = Heavy chain CDR2
INWNGGST

SEQ ID NO: 11175 - protein, 8 aa, Homo sapiens
  REGION 1..8: note = Heavy chain CDR2
INWNGGNT

SEQ ID NO: 11176 - protein, 8 aa, Homo sapiens
  REGION 1..8: note = Heavy chain CDR2
IWYDGTIK

SEQ ID NO: 11177 - protein, 8 aa, Homo sapiens
  REGION 1..8: note = Heavy chain CDR2
TWYDGSNK

SEQ ID NO: 11178 - protein, 8 aa, Homo sapiens
  REGION 1..8: note = Heavy chain CDR2
INWNGGNT

SEQ ID NO: 11179 - protein, 8 aa, Homo sapiens
  REGION 1..8: note = Heavy chain CDR2
IWYDGRNK

SEQ ID NO: 11180 - protein, 8 aa, Homo sapiens
  REGION 1..8: note = Heavy chain CDR2
INPSGGSS

SEQ ID NO: 11181 - protein, 8 aa, Homo sapiens
  REGION 1..8: note = Heavy chain CDR2
IWYDGRNK

SEQ ID NO: 11182 - protein, 8 aa, Homo sapiens
  REGION 1..8: note = Heavy chain CDR2
IWYDGRNK

SEQ ID NO: 11183 - protein, 8 aa, Homo sapiens
  REGION 1..8: note = Heavy chain CDR2
IWYDGNNK

SEQ ID NO: 11184 - protein, 8 aa, Homo sapiens
  REGION 1..8: note = Heavy chain CDR2
ISAYNGNT

SEQ ID NO: 11185 - protein, 8 aa, Homo sapiens
  REGION 1..8: note = Heavy chain CDR2
INWNGGNT

SEQ ID NO: 11186 - protein, 8 aa, Homo sapiens
  REGION 1..8: note = Heavy chain CDR2
ISVYNGNT

SEQ ID NO: 11187 - protein, 8 aa, Homo sapiens
  REGION 1..8: note = Heavy chain CDR2
IFYDGSNN

SEQ ID NO: 11188 - protein, 8 aa, Homo sapiens
  REGION 1..8: note = Heavy chain CDR2
IWYDGRNK

SEQ ID NO: 11189 - protein, 8 aa, Homo sapiens
  REGION 1..8: note = Heavy chain CDR2
INWNGGNT

SEQ ID NO: 11190 - protein, 8 aa, Homo sapiens
  REGION 1..8: note = Heavy chain CDR2
INWNGGST

SEQ ID NO: 11191 - protein, 8 aa, Homo sapiens
  REGION 1..8: note = Heavy chain CDR2
INPSSGGS

SEQ ID NO: 11192 - protein, 8 aa, Homo sapiens
  REGION 1..8: note = Heavy chain CDR2
IWYDGNNK

SEQ ID NO: 11193 - protein, 8 aa, Homo sapiens
  REGION 1..8: note = Heavy chain CDR2
IWNDGSNK

SEQ ID NO: 11194 - protein, 8 aa, Homo sapiens
  REGION 1..8: note = Heavy chain CDR2
IWYDGRNK

SEQ ID NO: 11195 - protein, 8 aa, Homo sapiens
  REGION 1..8: note = Heavy chain CDR2
ISAYNGNT

SEQ ID NO: 11196 - protein, 8 aa, Homo sapiens
  REGION 1..8: note = Heavy chain CDR2
IWYDGNNK

SEQ ID NO: 11197 - protein, 8 aa, Homo sapiens
  REGION 1..8: note = Heavy chain CDR2
INWNGGST

SEQ ID NO: 11198 - protein, 8 aa, Homo sapiens
  REGION 1..8: note = Heavy chain CDR2
INWNGGST

SEQ ID NO: 11199 - protein, 8 aa, Homo sapiens
  REGION 1..8: note = Heavy chain CDR2
INWNGGNT

SEQ ID NO: 11200 - protein, 8 aa, Homo sapiens
  REGION 1..8: note = Heavy chain CDR2
INWNGGST

SEQ ID NO: 11201 - protein, 8 aa, Homo sapiens
  REGION 1..8: note = Heavy chain CDR2
ISAYNGNT

SEQ ID NO: 11202 - protein, 8 aa, Homo sapiens
  REGION 1..8: note = Heavy chain CDR2
INWNGGNT

SEQ ID NO: 11203 - protein, 8 aa, Homo sapiens
  REGION 1..8: note = Heavy chain CDR2
INWNGGNT

SEQ ID NO: 11204 - protein, 8 aa, Homo sapiens
  REGION 1..8: note = Heavy chain CDR2
INWNGGNT

SEQ ID NO: 11205 - protein, 8 aa, Homo sapiens
  REGION 1..8: note = Heavy chain CDR2
INWNGAST

SEQ ID NO: 11206 - protein, 8 aa, Homo sapiens
  REGION 1..8: note = Heavy chain CDR2
INWNGGNT

SEQ ID NO: 11207 - protein, 8 aa, Homo sapiens
  REGION 1..8: note = Heavy chain CDR2
IWNDGSNK

SEQ ID NO: 11208 - protein, 8 aa, Homo sapiens
  REGION 1..8: note = Heavy chain CDR2
INWNGGNT

SEQ ID NO: 11209 - protein, 8 aa, Homo sapiens
  REGION 1..8: note = Heavy chain CDR2
ISVYNGNT

SEQ ID NO: 11210 - protein, 8 aa, Homo sapiens
  REGION 1..8: note = Heavy chain CDR2
INWNGGST

SEQ ID NO: 11211 - protein, 8 aa, Homo sapiens
  REGION 1..8: note = Heavy chain CDR2
IWYDGGIK

SEQ ID NO: 11212 - protein, 8 aa, Homo sapiens
  REGION 1..8: note = Heavy chain CDR2
ISAYNGNT

SEQ ID NO: 11213 - protein, 8 aa, Homo sapiens
  REGION 1..8: note = Heavy chain CDR2
INWNGGNT

SEQ ID NO: 11214 - protein, 8 aa, Homo sapiens
  REGION 1..8: note = Heavy chain CDR2
ISAYNGNT

SEQ ID NO: 11215 - protein, 8 aa, Homo sapiens
  REGION 1..8: note = Heavy chain CDR2
TWYDGSNK

SEQ ID NO: 11216 - protein, 8 aa, Homo sapiens
  REGION 1..8: note = Heavy chain CDR2
ISAYNGNT

SEQ ID NO: 11217 - protein, 8 aa, Homo sapiens
  REGION 1..8: note = Heavy chain CDR2
IWYDGSNK

SEQ ID NO: 11218 - protein, 8 aa, Homo sapiens
  REGION 1..8: note = Heavy chain CDR2
ILYDGNNK

SEQ ID NO: 11219 - protein, 8 aa, Homo sapiens
  REGION 1..8: note = Heavy chain CDR2
IWYDGSNK

SEQ ID NO: 11220 - protein, 8 aa, Homo sapiens
  REGION 1..8: note = Heavy chain CDR2
IWYDGSNK

SEQ ID NO: 11221 - protein, 8 aa, Homo sapiens
  REGION 1..8: note = Heavy chain CDR2
IWYDGNNK

SEQ ID NO: 11222 - protein, 8 aa, Homo sapiens
  REGION 1..8: note = Heavy chain CDR2
IWYDGNNK

SEQ ID NO: 11223 - protein, 7 aa, Homo sapiens
  REGION 1..7: note = Heavy chain CDR2
IHYSGRT

SEQ ID NO: 11224 - protein, 8 aa, Homo sapiens
  REGION 1..8: note = Heavy chain CDR2
IWYDGNNK

SEQ ID NO: 11225 - protein, 8 aa, Homo sapiens
  REGION 1..8: note = Heavy chain CDR2
ISAYNGNT

SEQ ID NO: 11226 - protein, 8 aa, Homo sapiens
  REGION 1..8: note = Heavy chain CDR2
IWYDGSNK

SEQ ID NO: 11227 - protein, 8 aa, Homo sapiens
  REGION 1..8: note = Heavy chain CDR2
IWYDGSNK

SEQ ID NO: 11228 - protein, 8 aa, Homo sapiens
  REGION 1..8: note = Heavy chain CDR2
VWYDGSNK

SEQ ID NO: 11229 - protein, 8 aa, Homo sapiens
  REGION 1..8: note = Heavy chain CDR2
VWYDGSNK

SEQ ID NO: 11230 - protein, 8 aa, Homo sapiens
  REGION 1..8: note = Heavy chain CDR2
IWYDGSNR

SEQ ID NO: 11231 - protein, 8 aa, Homo sapiens
  REGION 1..8: note = Heavy chain CDR2
VWYDGSNK

SEQ ID NO: 11232 - protein, 8 aa, Homo sapiens
  REGION 1..8: note = Heavy chain CDR2
ISAYNGNT

SEQ ID NO: 11233 - protein, 8 aa, Homo sapiens
  REGION 1..8: note = Heavy chain CDR2
ISAYNGNT

SEQ ID NO: 11234 - protein, 8 aa, Homo sapiens
  REGION 1..8: note = Heavy chain CDR2
ISAYNGNT

SEQ ID NO: 11235 - protein, 8 aa, Homo sapiens
  REGION 1..8: note = Heavy chain CDR2
ISAYNGNT

SEQ ID NO: 11236 - protein, 8 aa, Homo sapiens
  REGION 1..8: note = Heavy chain CDR2
ISAYNGNT

SEQ ID NO: 11237 - protein, 8 aa, Homo sapiens
  REGION 1..8: note = Heavy chain CDR2
IWYDGRNK

SEQ ID NO: 11238 - protein, 8 aa, Homo sapiens
  REGION 1..8: note = Heavy chain CDR2
IWYDGSNK

SEQ ID NO: 11239 - protein, 8 aa, Homo sapiens
  REGION 1..8: note = Heavy chain CDR2
IWYDGSNK

SEQ ID NO: 11240 - protein, 8 aa, Homo sapiens
  REGION 1..8: note = Heavy chain CDR2
ISAYNGNT

SEQ ID NO: 11241 - protein, 8 aa, Homo sapiens
  REGION 1..8: note = Heavy chain CDR2
ISAYNGNT

SEQ ID NO: 11242 - protein, 8 aa, Homo sapiens
  REGION 1..8: note = Heavy chain CDR2
ISAYNGNT

SEQ ID NO: 11243 - protein, 8 aa, Homo sapiens
  REGION 1..8: note = Heavy chain CDR2
ISAYNGNT

SEQ ID NO: 11244 - protein, 8 aa, Homo sapiens
  REGION 1..8: note = Heavy chain CDR2
ILYDGNNK

SEQ ID NO: 11245 - protein, 8 aa, Homo sapiens
  REGION 1..8: note = Heavy chain CDR2
ISAYNGNT

SEQ ID NO: 11246 - protein, 8 aa, Homo sapiens
  REGION 1..8: note = Heavy chain CDR2
VWYDGSNK

SEQ ID NO: 11247 - protein, 8 aa, Homo sapiens
  REGION 1..8: note = Heavy chain CDR2
TWYDGSNK

SEQ ID NO: 11248 - protein, 8 aa, Homo sapiens
  REGION 1..8: note = Heavy chain CDR2
ISAYNGNT

SEQ ID NO: 11249 - protein, 8 aa, Homo sapiens
  REGION 1..8: note = Heavy chain CDR2
TWYDGSNK

SEQ ID NO: 11250 - protein, 8 aa, Homo sapiens
  REGION 1..8: note = Heavy chain CDR2
ISAYNGNT

SEQ ID NO: 11251 - protein, 8 aa, Homo sapiens
  REGION 1..8: note = Heavy chain CDR2
IWYDGSNK

SEQ ID NO: 11252 - protein, 8 aa, Homo sapiens
  REGION 1..8: note = Heavy chain CDR2
IWYDGSNK

SEQ ID NO: 11253 - protein, 8 aa, Homo sapiens
  REGION 1..8: note = Heavy chain CDR2
IWYDGSNK

SEQ ID NO: 11254 - protein, 8 aa, Homo sapiens
  REGION 1..8: note = Heavy chain CDR2
IWYDGSNK

SEQ ID NO: 11255 - protein, 8 aa, Homo sapiens
  REGION 1..8: note = Heavy chain CDR2
IWYDGNNK

SEQ ID NO: 11256 - protein, 8 aa, Homo sapiens
  REGION 1..8: note = Heavy chain CDR2
IWYEGRNK

SEQ ID NO: 11257 - protein, 8 aa, Homo sapiens
  REGION 1..8: note = Heavy chain CDR2
IWYDGSNK

SEQ ID NO: 11258 - protein, 8 aa, Homo sapiens
  REGION 1..8: note = Heavy chain CDR2
TWYDGSNK

SEQ ID NO: 11259 - protein, 8 aa, Homo sapiens
  REGION 1..8: note = Heavy chain CDR2
TWYDGRNK

SEQ ID NO: 11260 - protein, 8 aa, Homo sapiens
  REGION 1..8: note = Heavy chain CDR2
IWYDGSNK

SEQ ID NO: 11261 - protein, 8 aa, Homo sapiens
  REGION 1..8: note = Heavy chain CDR2
IWYDGSNK

SEQ ID NO: 11262 - protein, 8 aa, Homo sapiens
  REGION 1..8: note = Heavy chain CDR2
TWYDGSNK

SEQ ID NO: 11263 - protein, 8 aa, Homo sapiens
  REGION 1..8: note = Heavy chain CDR2
IWYDGSNK

SEQ ID NO: 11264 - protein, 8 aa, Homo sapiens
  REGION 1..8: note = Heavy chain CDR2
TWYDGSNK

SEQ ID NO: 11265 - protein, 8 aa, Homo sapiens
  REGION 1..8: note = Heavy chain CDR2
IWYDGSNK

SEQ ID NO: 11266 - protein, 8 aa, Homo sapiens
  REGION 1..8: note = Heavy chain CDR2
IWYDGNNK

SEQ ID NO: 11267 - protein, 8 aa, Homo sapiens
  REGION 1..8: note = Heavy chain CDR2
VWYDGNNK

SEQ ID NO: 11268 - protein, 8 aa, Homo sapiens
  REGION 1..8: note = Heavy chain CDR2
IWYDGSNK

SEQ ID NO: 11269 - protein, 8 aa, Homo sapiens
  REGION 1..8: note = Heavy chain CDR2
TWYDGSNK

SEQ ID NO: 11270 - protein, 8 aa, Homo sapiens
  REGION 1..8: note = Heavy chain CDR2
IWYDGSNK

SEQ ID NO: 11271 - protein, 8 aa, Homo sapiens
  REGION 1..8: note = Heavy chain CDR2
IWYEGSNK

SEQ ID NO: 11272 - protein, 8 aa, Homo sapiens
  REGION 1..8: note = Heavy chain CDR2
KWYDGSNK

SEQ ID NO: 11273 - protein, 8 aa, Homo sapiens
  REGION 1..8: note = Heavy chain CDR2
IWYDGSNK

SEQ ID NO: 11274 - protein, 8 aa, Homo sapiens
  REGION 1..8: note = Heavy chain CDR2
TWYDGNNK

SEQ ID NO: 11275 - protein, 8 aa, Homo sapiens
  REGION 1..8: note = Heavy chain CDR2
IWYDGSNK

SEQ ID NO: 11276 - protein, 8 aa, Homo sapiens
  REGION 1..8: note = Heavy chain CDR2
IWYDGSNK

SEQ ID NO: 11277 - protein, 8 aa, Homo sapiens
  REGION 1..8: note = Heavy chain CDR2
TWYNGRNK

SEQ ID NO: 11278 - protein, 8 aa, Homo sapiens
  REGION 1..8: note = Heavy chain CDR2
VWYDGNNK

SEQ ID NO: 11279 - protein, 8 aa, Homo sapiens
  REGION 1..8: note = Heavy chain CDR2
VWYDGNNK

SEQ ID NO: 11280 - protein, 7 aa, Homo sapiens
  REGION 1..7: note = Heavy chain CDR2
IHYSGRT

SEQ ID NO: 11281 - protein, 8 aa, Homo sapiens
  REGION 1..8: note = Heavy chain CDR2
IWYDGSNK

SEQ ID NO: 11282 - protein, 8 aa, Homo sapiens
  REGION 1..8: note = Heavy chain CDR2
ISGSGGGT

SEQ ID NO: 11283 - protein, 8 aa, Homo sapiens
  REGION 1..8: note = Heavy chain CDR2
TWYNGRNK

SEQ ID NO: 11284 - protein, 8 aa, Homo sapiens
  REGION 1..8: note = Heavy chain CDR2
ISYDGSKK

SEQ ID NO: 11285 - protein, 8 aa, Homo sapiens
  REGION 1..8: note = Heavy chain CDR2
TWYDGRNK

SEQ ID NO: 11286 - protein, 8 aa, Homo sapiens
  REGION 1..8: note = Heavy chain CDR2
IWYDGSNK

SEQ ID NO: 11287 - protein, 8 aa, Homo sapiens
  REGION 1..8: note = Heavy chain CDR2
TWYDGSNK

SEQ ID NO: 11288 - protein, 7 aa, Homo sapiens
  REGION 1..7: note = Heavy chain CDR2
IYYSGRT

SEQ ID NO: 11289 - protein, 8 aa, Homo sapiens
  REGION 1..8: note = Heavy chain CDR2
IWYDGSNK

SEQ ID NO: 11290 - protein, 8 aa, Homo sapiens
  REGION 1..8: note = Heavy chain CDR2
IWYDGRNK

SEQ ID NO: 11291 - protein, 8 aa, Homo sapiens
  REGION 1..8: note = Heavy chain CDR2
ISYDGSNK

SEQ ID NO: 11292 - protein, 8 aa, Homo sapiens
  REGION 1..8: note = Heavy chain CDR2
ISYDGSHK

SEQ ID NO: 11293 - protein, 8 aa, Homo sapiens
  REGION 1..8: note = Heavy chain CDR2
ISYDGSNK

SEQ ID NO: 11294 - protein, 8 aa, Homo sapiens
  REGION 1..8: note = Heavy chain CDR2
IKQDGSEK

SEQ ID NO: 11295 - protein, 8 aa, Homo sapiens
  REGION 1..8: note = Heavy chain CDR2
IWYDGNNK

SEQ ID NO: 11296 - protein, 7 aa, Homo sapiens
  REGION 1..7: note = Heavy chain CDR2
IYYSGST

SEQ ID NO: 11297 - protein, 8 aa, Homo sapiens
  REGION 1..8: note = Heavy chain CDR2
IWYDGSNK

SEQ ID NO: 11298 - protein, 8 aa, Homo sapiens
  REGION 1..8: note = Heavy chain CDR2
IWYDGSNK

SEQ ID NO: 11299 - protein, 8 aa, Homo sapiens
  REGION 1..8: note = Heavy chain CDR2
IWYDGNNK

SEQ ID NO: 11300 - protein, 8 aa, Homo sapiens
  REGION 1..8: note = Heavy chain CDR2
ISAYNGNT

SEQ ID NO: 11301 - protein, 8 aa, Homo sapiens
  REGION 1..8: note = Heavy chain CDR2
VWYDGNNK

SEQ ID NO: 11302 - protein, 8 aa, Homo sapiens
  REGION 1..8: note = Heavy chain CDR2
IWYDGSNK

SEQ ID NO: 11303 - protein, 8 aa, Homo sapiens
  REGION 1..8: note = Heavy chain CDR2
IWYDGNNK

SEQ ID NO: 11304 - protein, 8 aa, Homo sapiens
  REGION 1..8: note = Heavy chain CDR2
ISVYNGNT

SEQ ID NO: 11305 - protein, 8 aa, Homo sapiens
  REGION 1..8: note = Heavy chain CDR2
LWYDGSNN

SEQ ID NO: 11306 - protein, 8 aa, Homo sapiens
  REGION 1..8: note = Heavy chain CDR2
VWYDGNNK

SEQ ID NO: 11307 - protein, 9 aa, Homo sapiens
  REGION 1..9: note = Heavy chain CDR2
TYYRSKWYN

SEQ ID NO: 11308 - protein, 10 aa, Homo sapiens
  REGION 1..10: note = Heavy chain CDR2
IRSKTYGGTT

SEQ ID NO: 11309 - protein, 8 aa, Homo sapiens
  REGION 1..8: note = Heavy chain CDR2
IWYDGSNK

SEQ ID NO: 11310 - protein, 8 aa, Homo sapiens
  REGION 1..8: note = Heavy chain CDR2
ISAYNGNT

SEQ ID NO: 11311 - protein, 8 aa, Homo sapiens
  REGION 1..8: note = Heavy chain CDR2
TWYDGSNK

SEQ ID NO: 11312 - protein, 8 aa, Homo sapiens
  REGION 1..8: note = Heavy chain CDR2
IWYDGNNK

SEQ ID NO: 11313 - protein, 7 aa, Homo sapiens
  REGION 1..7: note = Heavy chain CDR2
IYHSGST

SEQ ID NO: 11314 - protein, 8 aa, Homo sapiens
  REGION 1..8: note = Heavy chain CDR2
IWYDGSNK

SEQ ID NO: 11315 - protein, 8 aa, Homo sapiens
  REGION 1..8: note = Heavy chain CDR2
TWYDGSNK

SEQ ID NO: 11316 - protein, 8 aa, Homo sapiens
  REGION 1..8: note = Heavy chain CDR2
TWYDGRNK

SEQ ID NO: 11317 - protein, 8 aa, Homo sapiens
  REGION 1..8: note = Heavy chain CDR2
TWYDGSNK

SEQ ID NO: 11318 - protein, 8 aa, Homo sapiens
  REGION 1..8: note = Heavy chain CDR2
IWYDGSNK

SEQ ID NO: 11319 - protein, 8 aa, Homo sapiens
  REGION 1..8: note = Heavy chain CDR2
ISYDGSHK

SEQ ID NO: 11320 - protein, 8 aa, Homo sapiens
  REGION 1..8: note = Heavy chain CDR2
TWYNGRNK

SEQ ID NO: 11321 - protein, 8 aa, Homo sapiens
  REGION 1..8: note = Heavy chain CDR2
MWYDGSNK

SEQ ID NO: 11322 - protein, 8 aa, Homo sapiens
  REGION 1..8: note = Heavy chain CDR2
IWYDGSNK

SEQ ID NO: 11323 - protein, 8 aa, Homo sapiens
  REGION 1..8: note = Heavy chain CDR2
IWYDGSNK

SEQ ID NO: 11324 - protein, 8 aa, Homo sapiens
  REGION 1..8: note = Heavy chain CDR2
ISAYNGNT

SEQ ID NO: 11325 - protein, 8 aa, Homo sapiens
  REGION 1..8: note = Heavy chain CDR2
IWYDGSNK

SEQ ID NO: 11326 - protein, 8 aa, Homo sapiens
  REGION 1..8: note = Heavy chain CDR2
TWYDGSNK

SEQ ID NO: 11327 - protein, 8 aa, Homo sapiens
  REGION 1..8: note = Heavy chain CDR2
IWYDGSNK

SEQ ID NO: 11328 - protein, 8 aa, Homo sapiens
  REGION 1..8: note = Heavy chain CDR2
IWYDGSNK

SEQ ID NO: 11329 - protein, 8 aa, Homo sapiens
  REGION 1..8: note = Heavy chain CDR2
IWYDGSNK

SEQ ID NO: 11330 - protein, 8 aa, Homo sapiens
  REGION 1..8: note = Heavy chain CDR2
IWYDGSNK

SEQ ID NO: 11331 - protein, 8 aa, Homo sapiens
  REGION 1..8: note = Heavy chain CDR2
IWYDGSNK

SEQ ID NO: 11332 - protein, 8 aa, Homo sapiens
  REGION 1..8: note = Heavy chain CDR2
IWYDGSNK

SEQ ID NO: 11333 - protein, 8 aa, Homo sapiens
  REGION 1..8: note = Heavy chain CDR2
IWYDGSNK

SEQ ID NO: 11334 - protein, 8 aa, Homo sapiens
  REGION 1..8: note = Heavy chain CDR2
MWYDGSNK

SEQ ID NO: 11335 - protein, 8 aa, Homo sapiens
  REGION 1..8: note = Heavy chain CDR2
IWYDGSNK

SEQ ID NO: 11336 - protein, 8 aa, Homo sapiens
  REGION 1..8: note = Heavy chain CDR2
IWYDGSNK

SEQ ID NO: 11337 - protein, 8 aa, Homo sapiens
  REGION 1..8: note = Heavy chain CDR2
VWYDGNHK

SEQ ID NO: 11338 - protein, 8 aa, Homo sapiens
  REGION 1..8: note = Heavy chain CDR2
IWYDGSNK

SEQ ID NO: 11339 - protein, 8 aa, Homo sapiens
  REGION 1..8: note = Heavy chain CDR2
IWYDGNNR

SEQ ID NO: 11340 - protein, 8 aa, Homo sapiens
  REGION 1..8: note = Heavy chain CDR2
IWYDGSNK

SEQ ID NO: 11341 - protein, 8 aa, Homo sapiens
  REGION 1..8: note = Heavy chain CDR2
TWYDGSNK

SEQ ID NO: 11342 - protein, 8 aa, Homo sapiens
  REGION 1..8: note = Heavy chain CDR2
IWYDGSNK

SEQ ID NO: 11343 - protein, 8 aa, Homo sapiens
  REGION 1..8: note = Heavy chain CDR2
IWYDGSNK

SEQ ID NO: 11344 - protein, 8 aa, Homo sapiens
  REGION 1..8: note = Heavy chain CDR2
IWYDGSNK

SEQ ID NO: 11345 - protein, 8 aa, Homo sapiens
  REGION 1..8: note = Heavy chain CDR2
IWYDGSNK

SEQ ID NO: 11346 - protein, 8 aa, Homo sapiens
  REGION 1..8: note = Heavy chain CDR2
TWYDGSNK

SEQ ID NO: 11347 - protein, 8 aa, Homo sapiens
  REGION 1..8: note = Heavy chain CDR2
TWYDGSNK

SEQ ID NO: 11348 - protein, 8 aa, Homo sapiens
  REGION 1..8: note = Heavy chain CDR2
IWYDGSNK

SEQ ID NO: 11349 - protein, 8 aa, Homo sapiens
  REGION 1..8: note = Heavy chain CDR2
TWYDGSNK

SEQ ID NO: 11350 - protein, 8 aa, Homo sapiens
  REGION 1..8: note = Heavy chain CDR2
IWYDGRNK

SEQ ID NO: 11351 - protein, 8 aa, Homo sapiens
  REGION 1..8: note = Heavy chain CDR2
IWYDGRNK

SEQ ID NO: 11352 - protein, 8 aa, Homo sapiens
  REGION 1..8: note = Heavy chain CDR2
NWYDGSNK

SEQ ID NO: 11353 - protein, 8 aa, Homo sapiens
  REGION 1..8: note = Heavy chain CDR2
IWYEGRNK

SEQ ID NO: 11354 - protein, 8 aa, Homo sapiens
  REGION 1..8: note = Heavy chain CDR2
ISAYNGNT

SEQ ID NO: 11355 - protein, 8 aa, Homo sapiens
  REGION 1..8: note = Heavy chain CDR2
IWYDGSNK

SEQ ID NO: 11356 - protein, 8 aa, Homo sapiens
  REGION 1..8: note = Heavy chain CDR2
ISGGGLST

SEQ ID NO: 11357 - protein, 8 aa, Homo sapiens
  REGION 1..8: note = Heavy chain CDR2
IWYDGRNK

SEQ ID NO: 11358 - protein, 8 aa, Homo sapiens
  REGION 1..8: note = Heavy chain CDR2
IWYDGSNK

SEQ ID NO: 11359 - protein, 8 aa, Homo sapiens
  REGION 1..8: note = Heavy chain CDR2
IWYEGSNK

SEQ ID NO: 11360 - protein, 8 aa, Homo sapiens
  REGION 1..8: note = Heavy chain CDR2
IWYEGRNK

SEQ ID NO: 11361 - protein, 8 aa, Homo sapiens
  REGION 1..8: note = Heavy chain CDR2
ISGSGGST

SEQ ID NO: 11362 - protein, 8 aa, Homo sapiens
  REGION 1..8: note = Heavy chain CDR2
IWYDGSNK

SEQ ID NO: 11363 - protein, 8 aa, Homo sapiens
  REGION 1..8: note = Heavy chain CDR2
IWYDGSNK

SEQ ID NO: 11364 - protein, 8 aa, Homo sapiens
  REGION 1..8: note = Heavy chain CDR2
ISVYNGNT

SEQ ID NO: 11365 - protein, 8 aa, Homo sapiens
  REGION 1..8: note = Heavy chain CDR2
IWYDGRNK

SEQ ID NO: 11366 - protein, 8 aa, Homo sapiens
  REGION 1..8: note = Heavy chain CDR2
IWYDGSNR

SEQ ID NO: 11367 - protein, 8 aa, Homo sapiens
  REGION 1..8: note = Heavy chain CDR2
IWYEGSNK

SEQ ID NO: 11368 - protein, 8 aa, Homo sapiens
  REGION 1..8: note = Heavy chain CDR2
IWYDGSYK

SEQ ID NO: 11369 - protein, 8 aa, Homo sapiens
  REGION 1..8: note = Heavy chain CDR2
ISAYNGNT

SEQ ID NO: 11370 - protein, 8 aa, Homo sapiens
  REGION 1..8: note = Heavy chain CDR2
ISAYNGNT

SEQ ID NO: 11371 - protein, 8 aa, Homo sapiens
  REGION 1..8: note = Heavy chain CDR2
IWYDGNNK

SEQ ID NO: 11372 - protein, 8 aa, Homo sapiens
  REGION 1..8: note = Heavy chain CDR2
IWYDGNNK

SEQ ID NO: 11373 - protein, 8 aa, Homo sapiens
  REGION 1..8: note = Heavy chain CDR2
IWYDGSNR

SEQ ID NO: 11374 - protein, 8 aa, Homo sapiens
  REGION 1..8: note = Heavy chain CDR2
ISAYNGNT

SEQ ID NO: 11375 - protein, 8 aa, Homo sapiens
  REGION 1..8: note = Heavy chain CDR2
IWYDGRNK

SEQ ID NO: 11376 - protein, 8 aa, Homo sapiens
  REGION 1..8: note = Heavy chain CDR2
IWYDGRNK

SEQ ID NO: 11377 - protein, 8 aa, Homo sapiens
  REGION 1..8: note = Heavy chain CDR2
IWYDGSNK

SEQ ID NO: 11378 - protein, 8 aa, Homo sapiens
  REGION 1..8: note = Heavy chain CDR2
SWYDGSNK

SEQ ID NO: 11379 - protein, 8 aa, Homo sapiens
  REGION 1..8: note = Heavy chain CDR2
IWYDGRNK

SEQ ID NO: 11380 - protein, 8 aa, Homo sapiens
  REGION 1..8: note = Heavy chain CDR2
ISAYNGNT

SEQ ID NO: 11381 - protein, 8 aa, Homo sapiens
  REGION 1..8: note = Heavy chain CDR2
ISAYNGNT

SEQ ID NO: 11382 - protein, 8 aa, Homo sapiens
  REGION 1..8: note = Heavy chain CDR2
IWYDGSNK

SEQ ID NO: 11383 - protein, 8 aa, Homo sapiens
  REGION 1..8: note = Heavy chain CDR2
IWYDGRNK

SEQ ID NO: 11384 - protein, 8 aa, Homo sapiens
  REGION 1..8: note = Heavy chain CDR2
VLYDGNNK

SEQ ID NO: 11385 - protein, 8 aa, Homo sapiens
  REGION 1..8: note = Heavy chain CDR2
IWYDGRNK

SEQ ID NO: 11386 - protein, 8 aa, Homo sapiens
  REGION 1..8: note = Heavy chain CDR2
IWYDGSNK

SEQ ID NO: 11387 - protein, 8 aa, Homo sapiens
  REGION 1..8: note = Heavy chain CDR2
ISAYNGNT

SEQ ID NO: 11388 - protein, 8 aa, Homo sapiens
  REGION 1..8: note = Heavy chain CDR2
IWYDGRNK

SEQ ID NO: 11389 - protein, 8 aa, Homo sapiens
  REGION 1..8: note = Heavy chain CDR2
IWYDGNNK

SEQ ID NO: 11390 - protein, 8 aa, Homo sapiens
  REGION 1..8: note = Heavy chain CDR2
IWYDGRNK

SEQ ID NO: 11391 - protein, 8 aa, Homo sapiens
  REGION 1..8: note = Heavy chain CDR2
IWYDGNNK

SEQ ID NO: 11392 - protein, 8 aa, Homo sapiens
  REGION 1..8: note = Heavy chain CDR2
IWYDVGNK

SEQ ID NO: 11393 - protein, 8 aa, Homo sapiens
  REGION 1..8: note = Heavy chain CDR2
IWYDGSNK

SEQ ID NO: 11394 - protein, 8 aa, Homo sapiens
  REGION 1..8: note = Heavy chain CDR2
ISAYNGNT

SEQ ID NO: 11395 - protein, 8 aa, Homo sapiens
  REGION 1..8: note = Heavy chain CDR2
IWYDGINK

SEQ ID NO: 11396 - protein, 8 aa, Homo sapiens
  REGION 1..8: note = Heavy chain CDR2
IWYDGRNK

SEQ ID NO: 11397 - protein, 8 aa, Homo sapiens
  REGION 1..8: note = Heavy chain CDR2
ISVYNGNT

SEQ ID NO: 11398 - protein, 8 aa, Homo sapiens
  REGION 1..8: note = Heavy chain CDR2
SWYDGSNK

SEQ ID NO: 11399 - protein, 8 aa, Homo sapiens
  REGION 1..8: note = Heavy chain CDR2
IWYDGSNK

SEQ ID NO: 11400 - protein, 8 aa, Homo sapiens
  REGION 1..8: note = Heavy chain CDR2
ISVYNGNT

SEQ ID NO: 11401 - protein, 8 aa, Homo sapiens
  REGION 1..8: note = Heavy chain CDR2
ISAYNGNT

SEQ ID NO: 11402 - protein, 8 aa, Homo sapiens
  REGION 1..8: note = Heavy chain CDR2
IWYDGRNK

SEQ ID NO: 11403 - protein, 8 aa, Homo sapiens
  REGION 1..8: note = Heavy chain CDR2
NWYDGSNK

SEQ ID NO: 11404 - protein, 8 aa, Homo sapiens
  REGION 1..8: note = Heavy chain CDR2
IWYDGSNK

SEQ ID NO: 11405 - protein, 8 aa, Homo sapiens
  REGION 1..8: note = Heavy chain CDR2
ISAYNGNT

SEQ ID NO: 11406 - protein, 8 aa, Homo sapiens
  REGION 1..8: note = Heavy chain CDR2
ISAYNGNT

SEQ ID NO: 11407 - protein, 8 aa, Homo sapiens
  REGION 1..8: note = Heavy chain CDR2
ISAYNGNT

SEQ ID NO: 11408 - protein, 8 aa, Homo sapiens
  REGION 1..8: note = Heavy chain CDR2
IWYDGNNK

SEQ ID NO: 11409 - protein, 8 aa, Homo sapiens
  REGION 1..8: note = Heavy chain CDR2
IWYDGRNK

SEQ ID NO: 11410 - protein, 8 aa, Homo sapiens
  REGION 1..8: note = Heavy chain CDR2
IWYDGSNK

SEQ ID NO: 11411 - protein, 8 aa, Homo sapiens
  REGION 1..8: note = Heavy chain CDR2
ISAYNGNT

SEQ ID NO: 11412 - protein, 8 aa, Homo sapiens
  REGION 1..8: note = Heavy chain CDR2
TWYDGSNK

SEQ ID NO: 11413 - protein, 8 aa, Homo sapiens
  REGION 1..8: note = Heavy chain CDR2
ISAYNGNT

SEQ ID NO: 11414 - protein, 8 aa, Homo sapiens
  REGION 1..8: note = Heavy chain CDR2
IWYDGSNR

SEQ ID NO: 11415 - protein, 8 aa, Homo sapiens
  REGION 1..8: note = Heavy chain CDR2
IWYDGRNK

SEQ ID NO: 11416 - protein, 8 aa, Homo sapiens
  REGION 1..8: note = Heavy chain CDR2
ISAYNGNT

SEQ ID NO: 11417 - protein, 8 aa, Homo sapiens
  REGION 1..8: note = Heavy chain CDR2
IWYDGRNK

SEQ ID NO: 11418 - protein, 8 aa, Homo sapiens
  REGION 1..8: note = Heavy chain CDR2
IWYDGSYK

SEQ ID NO: 11419 - protein, 8 aa, Homo sapiens
  REGION 1..8: note = Heavy chain CDR2
IWYEGRNK

SEQ ID NO: 11420 - protein, 8 aa, Homo sapiens
  REGION 1..8: note = Heavy chain CDR2
IWYDGRNK

SEQ ID NO: 11421 - protein, 8 aa, Homo sapiens
  REGION 1..8: note = Heavy chain CDR2
IWYDGRNK

SEQ ID NO: 11422 - protein, 8 aa, Homo sapiens
  REGION 1..8: note = Heavy chain CDR2
IWYDGSNK

SEQ ID NO: 11423 - protein, 8 aa, Homo sapiens
  REGION 1..8: note = Heavy chain CDR2
IWYDGRNK

SEQ ID NO: 11424 - protein, 8 aa, Homo sapiens
  REGION 1..8: note = Heavy chain CDR2
ISYDGSNK

SEQ ID NO: 11425 - protein, 8 aa, Homo sapiens
  REGION 1..8: note = Heavy chain CDR2
IWYDGRNK

SEQ ID NO: 11426 - protein, 8 aa, Homo sapiens
  REGION 1..8: note = Heavy chain CDR2
IWYDGRNK

SEQ ID NO: 11427 - protein, 8 aa, Homo sapiens
  REGION 1..8: note = Heavy chain CDR2
IWYDGRNK

SEQ ID NO: 11428 - protein, 8 aa, Homo sapiens
  REGION 1..8: note = Heavy chain CDR2
IWYEGRNK

SEQ ID NO: 11429 - protein, 8 aa, Homo sapiens
  REGION 1..8: note = Heavy chain CDR2
IWYDGRNK

SEQ ID NO: 11430 - protein, 8 aa, Homo sapiens
  REGION 1..8: note = Heavy chain CDR2
IWYDGSNK

SEQ ID NO: 11431 - protein, 8 aa, Homo sapiens
  REGION 1..8: note = Heavy chain CDR2
ISAYNGNT

SEQ ID NO: 11432 - protein, 8 aa, Homo sapiens
  REGION 1..8: note = Heavy chain CDR2
IWYDGRNK

SEQ ID NO: 11433 - protein, 8 aa, Homo sapiens
  REGION 1..8: note = Heavy chain CDR2
IWFDGNNK

SEQ ID NO: 11434 - protein, 8 aa, Homo sapiens
  REGION 1..8: note = Heavy chain CDR2
IWYDGRNK

SEQ ID NO: 11435 - protein, 8 aa, Homo sapiens
  REGION 1..8: note = Heavy chain CDR2
IWYEGRNK

SEQ ID NO: 11436 - protein, 8 aa, Homo sapiens
  REGION 1..8: note = Heavy chain CDR2
INPSVGST

SEQ ID NO: 11437 - protein, 8 aa, Homo sapiens
  REGION 1..8: note = Heavy chain CDR2
INPSVGST

SEQ ID NO: 11438 - protein, 7 aa, Homo sapiens
  REGION 1..7: note = Heavy chain CDR2
IYYSGST

SEQ ID NO: 11439 - protein, 8 aa, Homo sapiens
  REGION 1..8: note = Heavy chain CDR2
IWYDGRNK

SEQ ID NO: 11440 - protein, 8 aa, Homo sapiens
  REGION 1..8: note = Heavy chain CDR2
IWYDGSNK

SEQ ID NO: 11441 - protein, 8 aa, Homo sapiens
  REGION 1..8: note = Heavy chain CDR2
IWYEGSNK

SEQ ID NO: 11442 - protein, 8 aa, Homo sapiens
  REGION 1..8: note = Heavy chain CDR2
IWYDGSNK

SEQ ID NO: 11443 - protein, 8 aa, Homo sapiens
  REGION 1..8: note = Heavy chain CDR2
IWYDGSNK

SEQ ID NO: 11444 - protein, 8 aa, Homo sapiens
  REGION 1..8: note = Heavy chain CDR2
IWYDGSNK

SEQ ID NO: 11445 - protein, 8 aa, Homo sapiens
  REGION 1..8: note = Heavy chain CDR2
IWYDGRNK

SEQ ID NO: 11446 - protein, 8 aa, Homo sapiens
  REGION 1..8: note = Heavy chain CDR2
ISAYNGNT

SEQ ID NO: 11447 - protein, 8 aa, Homo sapiens
  REGION 1..8: note = Heavy chain CDR2
VWYDGSNK

SEQ ID NO: 11448 - protein, 8 aa, Homo sapiens
  REGION 1..8: note = Heavy chain CDR2
IWYDGRNK

SEQ ID NO: 11449 - protein, 8 aa, Homo sapiens
  REGION 1..8: note = Heavy chain CDR2
IWYDGSYT

SEQ ID NO: 11450 - protein, 8 aa, Homo sapiens
  REGION 1..8: note = Heavy chain CDR2
NWYDGSNK

SEQ ID NO: 11451 - protein, 8 aa, Homo sapiens
  REGION 1..8: note = Heavy chain CDR2
IWYDGRNK

SEQ ID NO: 11452 - protein, 8 aa, Homo sapiens
  REGION 1..8: note = Heavy chain CDR2
IWYDGRNK

SEQ ID NO: 11453 - protein, 7 aa, Homo sapiens
  REGION 1..7: note = Heavy chain CDR2
IYYRGNT

SEQ ID NO: 11454 - protein, 8 aa, Homo sapiens
  REGION 1..8: note = Heavy chain CDR2
IWYDGRNK

SEQ ID NO: 11455 - protein, 8 aa, Homo sapiens
  REGION 1..8: note = Heavy chain CDR2
ISAYNGNT

SEQ ID NO: 11456 - protein, 8 aa, Homo sapiens
  REGION 1..8: note = Heavy chain CDR2
IWYDGRNK

SEQ ID NO: 11457 - protein, 8 aa, Homo sapiens
  REGION 1..8: note = Heavy chain CDR2
ISAYNGNT

SEQ ID NO: 11458 - protein, 8 aa, Homo sapiens
  REGION 1..8: note = Heavy chain CDR2
IWYDGRNK

SEQ ID NO: 11459 - protein, 8 aa, Homo sapiens
  REGION 1..8: note = Heavy chain CDR2
IWYDGRNK

SEQ ID NO: 11460 - protein, 8 aa, Homo sapiens
  REGION 1..8: note = Heavy chain CDR2
IWYDGNNK

SEQ ID NO: 11461 - protein, 8 aa, Homo sapiens
  REGION 1..8: note = Heavy chain CDR2
IWYDGSYK

SEQ ID NO: 11462 - protein, 8 aa, Homo sapiens
  REGION 1..8: note = Heavy chain CDR2
IWYDGRNK

SEQ ID NO: 11463 - protein, 7 aa, Homo sapiens
  REGION 1..7: note = Heavy chain CDR2
IYYRGNT

SEQ ID NO: 11464 - protein, 8 aa, Homo sapiens
  REGION 1..8: note = Heavy chain CDR2
ISAYNGNT

SEQ ID NO: 11465 - protein, 8 aa, Homo sapiens
  REGION 1..8: note = Heavy chain CDR2
IWYDGRNK

SEQ ID NO: 11466 - protein, 8 aa, Homo sapiens
  REGION 1..8: note = Heavy chain CDR2
IWYDGRNK

SEQ ID NO: 11467 - protein, 8 aa, Homo sapiens
  REGION 1..8: note = Heavy chain CDR2
IWYEGRNK

SEQ ID NO: 11468 - protein, 8 aa, Homo sapiens
  REGION 1..8: note = Heavy chain CDR2
IWYDGSNK

SEQ ID NO: 11469 - protein, 8 aa, Homo sapiens
  REGION 1..8: note = Heavy chain CDR2
IWYDGRNK

SEQ ID NO: 11470 - protein, 8 aa, Homo sapiens
  REGION 1..8: note = Heavy chain CDR2
IWYDGRNK

SEQ ID NO: 11471 - protein, 8 aa, Homo sapiens
  REGION 1..8: note = Heavy chain CDR2
IWYDGRNK

SEQ ID NO: 11472 - protein, 15 aa, Homo sapiens
  REGION 1..15: note = Heavy chain CDR3
ARTLRYFDWLSSFDY

SEQ ID NO: 11473 - protein, 12 aa, Homo sapiens
  REGION 1..12: note = Heavy chain CDR3
ARRRIQLWSFDY

SEQ ID NO: 11474 - protein, 12 aa, Homo sapiens
  REGION 1..12: note = Heavy chain CDR3
ARRRIQLWSFDY

SEQ ID NO: 11475 - protein, 12 aa, Homo sapiens
  REGION 1..12: note = Heavy chain CDR3
ARRRIQLWSFDY

SEQ ID NO: 11476 - skipped

SEQ ID NO: 11477 - protein, 12 aa, Homo sapiens
  REGION 1..12: note = Heavy chain CDR3
ARRRIQLWSFDY

SEQ ID NO: 11478 - protein, 12 aa, Homo sapiens
  REGION 1..12: note = Heavy chain CDR3
ARRRIQLWSFDY

SEQ ID NO: 11479 - protein, 17 aa, Homo sapiens
  REGION 1..17: note = Heavy chain CDR3
AREGNWRNYYYYYGMDV

SEQ ID NO: 11480 - protein, 9 aa, Homo sapiens
  REGION 1..9: note = Heavy chain CDR3
TIIAAAGHY

SEQ ID NO: 11481 - protein, 8 aa, Homo sapiens
  REGION 1..8: note = Heavy chain CDR3
ARGWPSDY

SEQ ID NO: 11482 - protein, 12 aa, Homo sapiens
  REGION 1..12: note = Heavy chain CDR3
ARRRIQLWSFDY

SEQ ID NO: 11483 - protein, 13 aa, Homo sapiens
  REGION 1..13: note = Heavy chain CDR3
ARGDVDIVATFDY

SEQ ID NO: 11484 - protein, 12 aa, Homo sapiens
  REGION 1..12: note = Heavy chain CDR3
ARRRIQLWSFDY

SEQ ID NO: 11485 - protein, 17 aa, Homo sapiens
  REGION 1..17: note = Heavy chain CDR3
AREDNWRNYYYYYGMDV

SEQ ID NO: 11486 - protein, 12 aa, Homo sapiens
  REGION 1..12: note = Heavy chain CDR3
ARRRIQLWSFDY

SEQ ID NO: 11487 - protein, 12 aa, Homo sapiens
  REGION 1..12: note = Heavy chain CDR3
ARRRIQLWSFDY

SEQ ID NO: 11488 - protein, 18 aa, Homo sapiens
  REGION 1..18: note = Heavy chain CDR3
ARDQEYYYGSGSSNWFDP

SEQ ID NO: 11489 - protein, 9 aa, Homo sapiens
  REGION 1..9: note = Heavy chain CDR3
TIIAAAGHY

SEQ ID NO: 11490 - protein, 12 aa, Homo sapiens
  REGION 1..12: note = Heavy chain CDR3
ARRRIQLWSFDY

SEQ ID NO: 11491 - protein, 17 aa, Homo sapiens
  REGION 1..17: note = Heavy chain CDR3
AREDNWRNYYYYYGTDV

SEQ ID NO: 11492 - protein, 15 aa, Homo sapiens
  REGION 1..15: note = Heavy chain CDR3
ARTRRYFDWLSSFDY

SEQ ID NO: 11493 - protein, 8 aa, Homo sapiens
  REGION 1..8: note = Heavy chain CDR3
ARGWPSDY

SEQ ID NO: 11494 - protein, 9 aa, Homo sapiens
  REGION 1..9: note = Heavy chain CDR3
TIIAAAGHY

SEQ ID NO: 11495 - protein, 15 aa, Homo sapiens
  REGION 1..15: note = Heavy chain CDR3
ARALRYFDWLSSFDY

SEQ ID NO: 11496 - protein, 8 aa, Homo sapiens
  REGION 1..8: note = Heavy chain CDR3
ARRWPSDY

SEQ ID NO: 11497 - protein, 15 aa, Homo sapiens
  REGION 1..15: note = Heavy chain CDR3
ARPLRYFDWLSSFDY

SEQ ID NO: 11498 - protein, 17 aa, Homo sapiens
  REGION 1..17: note = Heavy chain CDR3
ASEDNWRNYYYYYGMDV

SEQ ID NO: 11499 - protein, 15 aa, Homo sapiens
  REGION 1..15: note = Heavy chain CDR3
ARPLTMVRGRAYFDY

SEQ ID NO: 11500 - protein, 17 aa, Homo sapiens
  REGION 1..17: note = Heavy chain CDR3
AREDNWRNYYYYYGMDV

SEQ ID NO: 11501 - protein, 15 aa, Homo sapiens
  REGION 1..15: note = Heavy chain CDR3
ARTLRYVDWLSSFDY

SEQ ID NO: 11502 - protein, 15 aa, Homo sapiens
  REGION 1..15: note = Heavy chain CDR3
ARERYSSSWYRAFDI

SEQ ID NO: 11503 - protein, 8 aa, Homo sapiens
  REGION 1..8: note = Heavy chain CDR3
ARGWPSDY

SEQ ID NO: 11504 - protein, 15 aa, Homo sapiens
  REGION 1..15: note = Heavy chain CDR3
ASTLRYFDWLSSFDY

SEQ ID NO: 11505 - protein, 15 aa, Homo sapiens
  REGION 1..15: note = Heavy chain CDR3
ARTVRYFDWLSSFDY

SEQ ID NO: 11506 - protein, 18 aa, Homo sapiens
  REGION 1..18: note = Heavy chain CDR3
ARGRAYYYGSGSYYNFDY

SEQ ID NO: 11507 - protein, 8 aa, Homo sapiens
  REGION 1..8: note = Heavy chain CDR3
ARGWPYDY

SEQ ID NO: 11508 - protein, 12 aa, Homo sapiens
  REGION 1..12: note = Heavy chain CDR3
ARRRIQLWSFDY

SEQ ID NO: 11509 - protein, 15 aa, Homo sapiens
  REGION 1..15: note = Heavy chain CDR3
AGTLRYFDWLSSFDY

SEQ ID NO: 11510 - protein, 9 aa, Homo sapiens
  REGION 1..9: note = Heavy chain CDR3
TIIAAAGHY

SEQ ID NO: 11511 - protein, 17 aa, Homo sapiens
  REGION 1..17: note = Heavy chain CDR3
AREDNWRNYYYSYGMDV

SEQ ID NO: 11512 - protein, 12 aa, Homo sapiens
  REGION 1..12: note = Heavy chain CDR3
ARRRIQLWSFDY

SEQ ID NO: 11513 - protein, 12 aa, Homo sapiens
  REGION 1..12: note = Heavy chain CDR3
ARRRIQLWSFDY

SEQ ID NO: 11514 - protein, 15 aa, Homo sapiens
  REGION 1..15: note = Heavy chain CDR3
ARTLRDFDWLSSFDY

SEQ ID NO: 11515 - protein, 12 aa, Homo sapiens
  REGION 1..12: note = Heavy chain CDR3
ARRRIQLWSFGY

SEQ ID NO: 11516 - protein, 17 aa, Homo sapiens
  REGION 1..17: note = Heavy chain CDR3
AREDNWRNYYYYYGMDV

SEQ ID NO: 11517 - protein, 17 aa, Homo sapiens
  REGION 1..17: note = Heavy chain CDR3
AREDNWRKYYYYYGMDV

SEQ ID NO: 11518 - protein, 12 aa, Homo sapiens
  REGION 1..12: note = Heavy chain CDR3
ARGDILTGYYGY

SEQ ID NO: 11519 - protein, 12 aa, Homo sapiens
  REGION 1..12: note = Heavy chain CDR3
VRGDILTGYYGY

SEQ ID NO: 11520 - protein, 11 aa, Homo sapiens
  REGION 1..11: note = Heavy chain CDR3
ARGGQLGHFDY

SEQ ID NO: 11521 - protein, 11 aa, Homo sapiens
  REGION 1..11: note = Heavy chain CDR3
ARVHQLGPFDY

SEQ ID NO: 11522 - protein, 11 aa, Homo sapiens
  REGION 1..11: note = Heavy chain CDR3
ARMVRGLIINY

SEQ ID NO: 11523 - protein, 11 aa, Homo sapiens
  REGION 1..11: note = Heavy chain CDR3
ARKGHLGPFDY

SEQ ID NO: 11524 - protein, 11 aa, Homo sapiens
  REGION 1..11: note = Heavy chain CDR3
ARGDLRGWFDP

SEQ ID NO: 11525 - protein, 14 aa, Homo sapiens
  REGION 1..14: note = Heavy chain CDR3
AREGGSGWYEYLDL

SEQ ID NO: 11526 - protein, 12 aa, Homo sapiens
  REGION 1..12: note = Heavy chain CDR3
GRGDILTGYYGY

SEQ ID NO: 11527 - protein, 11 aa, Homo sapiens
  REGION 1..11: note = Heavy chain CDR3
TRVDWWGVFDF

SEQ ID NO: 11528 - protein, 11 aa, Homo sapiens
  REGION 1..11: note = Heavy chain CDR3
ARGGQLGHFDF

SEQ ID NO: 11529 - protein, 11 aa, Homo sapiens
  REGION 1..11: note = Heavy chain CDR3
ARGGLIGPFDY

SEQ ID NO: 11530 - protein, 11 aa, Homo sapiens
  REGION 1..11: note = Heavy chain CDR3
ARAGILTGLDY

SEQ ID NO: 11531 - protein, 11 aa, Homo sapiens
  REGION 1..11: note = Heavy chain CDR3
ARKGHLGPFDY

SEQ ID NO: 11532 - protein, 12 aa, Homo sapiens
  REGION 1..12: note = Heavy chain CDR3
ARGDILTGYYSY

SEQ ID NO: 11533 - protein, 11 aa, Homo sapiens
  REGION 1..11: note = Heavy chain CDR3
ARVHLLGPFDY

SEQ ID NO: 11534 - protein, 13 aa, Homo sapiens
  REGION 1..13: note = Heavy chain CDR3
ARGLLWFGESLDY

SEQ ID NO: 11535 - protein, 11 aa, Homo sapiens
  REGION 1..11: note = Heavy chain CDR3
ARVPQLGPFDY

SEQ ID NO: 11536 - protein, 11 aa, Homo sapiens
  REGION 1..11: note = Heavy chain CDR3
TRVDWWGAFDF

SEQ ID NO: 11537 - protein, 14 aa, Homo sapiens
  REGION 1..14: note = Heavy chain CDR3
AREGGSGWYEYIDL

SEQ ID NO: 11538 - protein, 13 aa, Homo sapiens
  REGION 1..13: note = Heavy chain CDR3
SRGLLWFGESLDY

SEQ ID NO: 11539 - protein, 12 aa, Homo sapiens
  REGION 1..12: note = Heavy chain CDR3
ARGDILTGYYDY

SEQ ID NO: 11540 - protein, 12 aa, Homo sapiens
  REGION 1..12: note = Heavy chain CDR3
VRGDILTGYYSY

SEQ ID NO: 11541 - protein, 12 aa, Homo sapiens
  REGION 1..12: note = Heavy chain CDR3
VRGDILTGYYGY

SEQ ID NO: 11542 - protein, 11 aa, Homo sapiens
  REGION 1..11: note = Heavy chain CDR3
ARVHQLGPFDY

SEQ ID NO: 11543 - protein, 12 aa, Homo sapiens
  REGION 1..12: note = Heavy chain CDR3
VRGDILTGYYGY

SEQ ID NO: 11544 - protein, 12 aa, Homo sapiens
  REGION 1..12: note = Heavy chain CDR3
ARGDMLTGYYGY

SEQ ID NO: 11545 - protein, 11 aa, Homo sapiens
  REGION 1..11: note = Heavy chain CDR3
ARVHQLGPFDS

SEQ ID NO: 11546 - protein, 11 aa, Homo sapiens
  REGION 1..11: note = Heavy chain CDR3
ARVHQLGPFDY

SEQ ID NO: 11547 - protein, 12 aa, Homo sapiens
  REGION 1..12: note = Heavy chain CDR3
ARGDILTGYYGY

SEQ ID NO: 11548 - protein, 12 aa, Homo sapiens
  REGION 1..12: note = Heavy chain CDR3
ARGDILTGYYGS

SEQ ID NO: 11549 - protein, 11 aa, Homo sapiens
  REGION 1..11: note = Heavy chain CDR3
ARGGHLGHFDY

SEQ ID NO: 11550 - protein, 12 aa, Homo sapiens
  REGION 1..12: note = Heavy chain CDR3
VRGDILTGYYGY

SEQ ID NO: 11551 - protein, 11 aa, Homo sapiens
  REGION 1..11: note = Heavy chain CDR3
ARGGQLGHFDY

SEQ ID NO: 11552 - protein, 11 aa, Homo sapiens
  REGION 1..11: note = Heavy chain CDR3
ARGAILTGFDY

SEQ ID NO: 11553 - protein, 11 aa, Homo sapiens
  REGION 1..11: note = Heavy chain CDR3
ARKGQLGPFDY

SEQ ID NO: 11554 - protein, 12 aa, Homo sapiens
  REGION 1..12: note = Heavy chain CDR3
ARRSSSWYYFDY

SEQ ID NO: 11555 - protein, 14 aa, Homo sapiens
  REGION 1..14: note = Heavy chain CDR3
AREGGSGWYEYLDL

SEQ ID NO: 11556 - protein, 11 aa, Homo sapiens
  REGION 1..11: note = Heavy chain CDR3
ARKGQLGPFDY

SEQ ID NO: 11557 - protein, 11 aa, Homo sapiens
  REGION 1..11: note = Heavy chain CDR3
TRGDYFGFWDY

SEQ ID NO: 11558 - protein, 11 aa, Homo sapiens
  REGION 1..11: note = Heavy chain CDR3
ARKGQLGPFDY

SEQ ID NO: 11559 - protein, 16 aa, Homo sapiens
  REGION 1..16: note = Heavy chain CDR3
ARVSYYYGSGSYYFDY

SEQ ID NO: 11560 - protein, 20 aa, Homo sapiens
  REGION 1..20: note = Heavy chain CDR3
AGFYYGSGSRYYYYYYGMDV

SEQ ID NO: 11561 - protein, 14 aa, Homo sapiens
  REGION 1..14: note = Heavy chain CDR3
AREGGSGWYEYIDL

SEQ ID NO: 11562 - protein, 11 aa, Homo sapiens
  REGION 1..11: note = Heavy chain CDR3
ARVHQLGPFDY

SEQ ID NO: 11563 - protein, 12 aa, Homo sapiens
  REGION 1..12: note = Heavy chain CDR3
ARRSSSWYYFDY

SEQ ID NO: 11564 - protein, 16 aa, Homo sapiens
  REGION 1..16: note = Heavy chain CDR3
ARVSYYYGSGSYYFDY

SEQ ID NO: 11565 - protein, 11 aa, Homo sapiens
  REGION 1..11: note = Heavy chain CDR3
ARKGQLGSFDY

SEQ ID NO: 11566 - protein, 12 aa, Homo sapiens
  REGION 1..12: note = Heavy chain CDR3
ARRSSSWYYFDY

SEQ ID NO: 11567 - protein, 16 aa, Homo sapiens
  REGION 1..16: note = Heavy chain CDR3
ARVSYYYGSGSYYFDY

SEQ ID NO: 11568 - protein, 12 aa, Homo sapiens
  REGION 1..12: note = Heavy chain CDR3
ARRSSSWYYFYY

SEQ ID NO: 11569 - protein, 11 aa, Homo sapiens
  REGION 1..11: note = Heavy chain CDR3
ARGAILTGFDS

SEQ ID NO: 11570 - protein, 16 aa, Homo sapiens
  REGION 1..16: note = Heavy chain CDR3
ARVSYYYGSGSYYFDY

SEQ ID NO: 11571 - protein, 14 aa, Homo sapiens
  REGION 1..14: note = Heavy chain CDR3
ARDGGSGWYEYLDL

SEQ ID NO: 11572 - protein, 12 aa, Homo sapiens
  REGION 1..12: note = Heavy chain CDR3
ARRSSSWYYFDY

SEQ ID NO: 11573 - protein, 12 aa, Homo sapiens
  REGION 1..12: note = Heavy chain CDR3
ARRSSSWYYFDY

SEQ ID NO: 11574 - protein, 10 aa, Homo sapiens
  REGION 1..10: note = Heavy chain CDR3
AREKHWFFDL

SEQ ID NO: 11575 - protein, 16 aa, Homo sapiens
  REGION 1..16: note = Heavy chain CDR3
ARVSYYYGSGSYYFDY

SEQ ID NO: 11576 - protein, 16 aa, Homo sapiens
  REGION 1..16: note = Heavy chain CDR3
ARVSYSYGSGSYYFDY

SEQ ID NO: 11577 - protein, 12 aa, Homo sapiens
  REGION 1..12: note = Heavy chain CDR3
ARRSSGWYYFDY

SEQ ID NO: 11578 - protein, 11 aa, Homo sapiens
  REGION 1..11: note = Heavy chain CDR3
TRSGWYWYFDL

SEQ ID NO: 11579 - protein, 17 aa, Homo sapiens
  REGION 1..17: note = Heavy chain CDR3
AREDNWRNYYYYYGMDV

SEQ ID NO: 11580 - protein, 16 aa, Homo sapiens
  REGION 1..16: note = Heavy chain CDR3
ARVSYYYGSGSYYFDY

SEQ ID NO: 11581 - protein, 16 aa, Homo sapiens
  REGION 1..16: note = Heavy chain CDR3
ARVSYYYGSGSYYFDY

SEQ ID NO: 11582 - protein, 11 aa, Homo sapiens
  REGION 1..11: note = Heavy chain CDR3
ARGAIFTGFDY

SEQ ID NO: 11583 - protein, 20 aa, Homo sapiens
  REGION 1..20: note = Heavy chain CDR3
AGFYYGSGSRYYYYYYGMDV

SEQ ID NO: 11584 - protein, 16 aa, Homo sapiens
  REGION 1..16: note = Heavy chain CDR3
ARVSYYYGSGSYYFDY

SEQ ID NO: 11585 - protein, 11 aa, Homo sapiens
  REGION 1..11: note = Heavy chain CDR3
ARKGQLGPFDY

SEQ ID NO: 11586 - protein, 11 aa, Homo sapiens
  REGION 1..11: note = Heavy chain CDR3
ARGAILTGFDV

SEQ ID NO: 11587 - protein, 12 aa, Homo sapiens
  REGION 1..12: note = Heavy chain CDR3
ARGSSRYWYFDL

SEQ ID NO: 11588 - protein, 12 aa, Homo sapiens
  REGION 1..12: note = Heavy chain CDR3
ARRSSSWYYFDY

SEQ ID NO: 11589 - protein, 12 aa, Homo sapiens
  REGION 1..12: note = Heavy chain CDR3
ARRSSGWYYFDY

SEQ ID NO: 11590 - protein, 16 aa, Homo sapiens
  REGION 1..16: note = Heavy chain CDR3
ARVSYYYGSGSYYFDY

SEQ ID NO: 11591 - protein, 11 aa, Homo sapiens
  REGION 1..11: note = Heavy chain CDR3
ARKGQLGPFDS

SEQ ID NO: 11592 - protein, 12 aa, Homo sapiens
  REGION 1..12: note = Heavy chain CDR3
ARRSSSWYYFDY

SEQ ID NO: 11593 - protein, 11 aa, Homo sapiens
  REGION 1..11: note = Heavy chain CDR3
ARKGQLGPFDS

SEQ ID NO: 11594 - protein, 16 aa, Homo sapiens
  REGION 1..16: note = Heavy chain CDR3
ARVSYSYGSGSYYFDY

SEQ ID NO: 11595 - protein, 12 aa, Homo sapiens
  REGION 1..12: note = Heavy chain CDR3
ARRSSSWYYFDY

SEQ ID NO: 11596 - protein, 12 aa, Homo sapiens
  REGION 1..12: note = Heavy chain CDR3
ARRSSSWYYFDY

SEQ ID NO: 11597 - protein, 16 aa, Homo sapiens
  REGION 1..16: note = Heavy chain CDR3
ARVSYYYGSGSYYFDY

SEQ ID NO: 11598 - protein, 20 aa, Homo sapiens
  REGION 1..20: note = Heavy chain CDR3
AGFYYGSGSRYYYYYYGMDV

SEQ ID NO: 11599 - protein, 11 aa, Homo sapiens
  REGION 1..11: note = Heavy chain CDR3
ARNGQLGPFDY

SEQ ID NO: 11600 - protein, 21 aa, Homo sapiens
  REGION 1..21: note = Heavy chain CDR3
AGYYYGSGSPLYYYYYYGMDV

SEQ ID NO: 11601 - protein, 11 aa, Homo sapiens
  REGION 1..11: note = Heavy chain CDR3
ARKGQLGPFDY

SEQ ID NO: 11602 - protein, 12 aa, Homo sapiens
  REGION 1..12: note = Heavy chain CDR3
ARRSSSWYYFDY

SEQ ID NO: 11603 - protein, 11 aa, Homo sapiens
  REGION 1..11: note = Heavy chain CDR3
ARAGNWGPFDY

SEQ ID NO: 11604 - protein, 11 aa, Homo sapiens
  REGION 1..11: note = Heavy chain CDR3
VRDGWELLGDY

SEQ ID NO: 11605 - protein, 11 aa, Homo sapiens
  REGION 1..11: note = Heavy chain CDR3
ARDGWKLLDDY

SEQ ID NO: 11606 - protein, 9 aa, Homo sapiens
  REGION 1..9: note = Heavy chain CDR3
ARVGPPFDY

SEQ ID NO: 11607 - protein, 11 aa, Homo sapiens
  REGION 1..11: note = Heavy chain CDR3
VRDGWKLLDDY

SEQ ID NO: 11608 - protein, 11 aa, Homo sapiens
  REGION 1..11: note = Heavy chain CDR3
ARITGPYAFDI

SEQ ID NO: 11609 - protein, 10 aa, Homo sapiens
  REGION 1..10: note = Heavy chain CDR3
ARVGANWFDP

SEQ ID NO: 11610 - protein, 11 aa, Homo sapiens
  REGION 1..11: note = Heavy chain CDR3
ARGGLIGGFDY

SEQ ID NO: 11611 - protein, 11 aa, Homo sapiens
  REGION 1..11: note = Heavy chain CDR3
ARGGLLGGFDY

SEQ ID NO: 11612 - protein, 16 aa, Homo sapiens
  REGION 1..16: note = Heavy chain CDR3
ARDPPITMVRGAPFDY

SEQ ID NO: 11613 - protein, 13 aa, Homo sapiens
  REGION 1..13: note = Heavy chain CDR3
ARTYNWNDVGWDY

SEQ ID NO: 11614 - protein, 11 aa, Homo sapiens
  REGION 1..11: note = Heavy chain CDR3
ARGGLLGGFDY

SEQ ID NO: 11615 - protein, 16 aa, Homo sapiens
  REGION 1..16: note = Heavy chain CDR3
ARDPPITMVRGAPFDY

SEQ ID NO: 11616 - protein, 11 aa, Homo sapiens
  REGION 1..11: note = Heavy chain CDR3
ARGGLTGPFDY

SEQ ID NO: 11617 - protein, 11 aa, Homo sapiens
  REGION 1..11: note = Heavy chain CDR3
ARGGIWGYFDY

SEQ ID NO: 11618 - protein, 11 aa, Homo sapiens
  REGION 1..11: note = Heavy chain CDR3
VRGGIWGYFDY

SEQ ID NO: 11619 - protein, 11 aa, Homo sapiens
  REGION 1..11: note = Heavy chain CDR3
ARVGLLGGMDV

SEQ ID NO: 11620 - protein, 10 aa, Homo sapiens
  REGION 1..10: note = Heavy chain CDR3
ARVGASGVDY

SEQ ID NO: 11621 - protein, 11 aa, Homo sapiens
  REGION 1..11: note = Heavy chain CDR3
ARAGNWGPFDY

SEQ ID NO: 11622 - protein, 10 aa, Homo sapiens
  REGION 1..10: note = Heavy chain CDR3
ARVGSSGVDY

SEQ ID NO: 11623 - protein, 12 aa, Homo sapiens
  REGION 1..12: note = Heavy chain CDR3
ARGPSGPYEGDY

SEQ ID NO: 11624 - protein, 11 aa, Homo sapiens
  REGION 1..11: note = Heavy chain CDR3
ARAGILGGMDV

SEQ ID NO: 11625 - protein, 11 aa, Homo sapiens
  REGION 1..11: note = Heavy chain CDR3
TRDGWRLLDDY

SEQ ID NO: 11626 - protein, 11 aa, Homo sapiens
  REGION 1..11: note = Heavy chain CDR3
VRDGWELLGDY

SEQ ID NO: 11627 - protein, 7 aa, Homo sapiens
  REGION 1..7: note = Heavy chain CDR3
TEERMDY

SEQ ID NO: 11628 - protein, 13 aa, Homo sapiens
  REGION 1..13: note = Heavy chain CDR3
TRTYTWNDVGWDY

SEQ ID NO: 11629 - protein, 11 aa, Homo sapiens
  REGION 1..11: note = Heavy chain CDR3
ARAGIWGPFDY

SEQ ID NO: 11630 - protein, 13 aa, Homo sapiens
  REGION 1..13: note = Heavy chain CDR3
ARTYTWNDVGWDY

SEQ ID NO: 11631 - protein, 11 aa, Homo sapiens
  REGION 1..11: note = Heavy chain CDR3
ARDGWRLLDDY

SEQ ID NO: 11632 - protein, 13 aa, Homo sapiens
  REGION 1..13: note = Heavy chain CDR3
ARTYNWNDVGWDY

SEQ ID NO: 11633 - protein, 11 aa, Homo sapiens
  REGION 1..11: note = Heavy chain CDR3
ARGGHYGPFDY

SEQ ID NO: 11634 - protein, 13 aa, Homo sapiens
  REGION 1..13: note = Heavy chain CDR3
ARTYTWNDVGWDY

SEQ ID NO: 11635 - protein, 11 aa, Homo sapiens
  REGION 1..11: note = Heavy chain CDR3
ARAGILGGMDV

SEQ ID NO: 11636 - protein, 21 aa, Homo sapiens
  REGION 1..21: note = Heavy chain CDR3
ARKGDTSNGSGSHYNEGFFDI

SEQ ID NO: 11637 - protein, 11 aa, Homo sapiens
  REGION 1..11: note = Heavy chain CDR3
ARGGLLGGFDY

SEQ ID NO: 11638 - protein, 11 aa, Homo sapiens
  REGION 1..11: note = Heavy chain CDR3
ARAGNWGPFDY

SEQ ID NO: 11639 - protein, 11 aa, Homo sapiens
  REGION 1..11: note = Heavy chain CDR3
ARAGNWGPFDY

SEQ ID NO: 11640 - protein, 11 aa, Homo sapiens
  REGION 1..11: note = Heavy chain CDR3
VRDGWRLLDDY

SEQ ID NO: 11641 - protein, 10 aa, Homo sapiens
  REGION 1..10: note = Heavy chain CDR3
ARVGANWFDP

SEQ ID NO: 11642 - protein, 11 aa, Homo sapiens
  REGION 1..11: note = Heavy chain CDR3
ARDGWELLDDY

SEQ ID NO: 11643 - protein, 11 aa, Homo sapiens
  REGION 1..11: note = Heavy chain CDR3
ARGGLLGGFDY

SEQ ID NO: 11644 - protein, 11 aa, Homo sapiens
  REGION 1..11: note = Heavy chain CDR3
ARGGLLGGFDY

SEQ ID NO: 11645 - protein, 10 aa, Homo sapiens
  REGION 1..10: note = Heavy chain CDR3
ARLSRAGHDY

SEQ ID NO: 11646 - protein, 11 aa, Homo sapiens
  REGION 1..11: note = Heavy chain CDR3
ARGGNWGPFDY

SEQ ID NO: 11647 - protein, 11 aa, Homo sapiens
  REGION 1..11: note = Heavy chain CDR3
ARAGNWGPFDY

SEQ ID NO: 11648 - protein, 11 aa, Homo sapiens
  REGION 1..11: note = Heavy chain CDR3
VRDGWELLDDY

SEQ ID NO: 11649 - protein, 11 aa, Homo sapiens
  REGION 1..11: note = Heavy chain CDR3
VRGGIWGNFDY

SEQ ID NO: 11650 - protein, 11 aa, Homo sapiens
  REGION 1..11: note = Heavy chain CDR3
ARGGIWGYFDS

SEQ ID NO: 11651 - protein, 11 aa, Homo sapiens
  REGION 1..11: note = Heavy chain CDR3
ARAGNWGPFDS

SEQ ID NO: 11652 - protein, 11 aa, Homo sapiens
  REGION 1..11: note = Heavy chain CDR3
ARDGWKLLDDY

SEQ ID NO: 11653 - protein, 11 aa, Homo sapiens
  REGION 1..11: note = Heavy chain CDR3
VRDGWELLGDY

SEQ ID NO: 11654 - protein, 11 aa, Homo sapiens
  REGION 1..11: note = Heavy chain CDR3
ARGGIWGYFDY

SEQ ID NO: 11655 - protein, 10 aa, Homo sapiens
  REGION 1..10: note = Heavy chain CDR3
ARVGASGVDY

SEQ ID NO: 11656 - protein, 7 aa, Homo sapiens
  REGION 1..7: note = Heavy chain CDR3
TEERMDY

SEQ ID NO: 11657 - protein, 16 aa, Homo sapiens
  REGION 1..16: note = Heavy chain CDR3
ARDPPITLVRGAPFDY

SEQ ID NO: 11658 - protein, 16 aa, Homo sapiens
  REGION 1..16: note = Heavy chain CDR3
ARDPPITMVRGAPFDY

SEQ ID NO: 11659 - protein, 10 aa, Homo sapiens
  REGION 1..10: note = Heavy chain CDR3
ARVGANWFDP

SEQ ID NO: 11660 - protein, 11 aa, Homo sapiens
  REGION 1..11: note = Heavy chain CDR3
ARGGLLGGFDY

SEQ ID NO: 11661 - protein, 11 aa, Homo sapiens
  REGION 1..11: note = Heavy chain CDR3
ARGGFFGPFDY

SEQ ID NO: 11662 - protein, 11 aa, Homo sapiens
  REGION 1..11: note = Heavy chain CDR3
VRDGWKLLDDY

SEQ ID NO: 11663 - protein, 16 aa, Homo sapiens
  REGION 1..16: note = Heavy chain CDR3
ARDPPITMVRGAPFDY

SEQ ID NO: 11664 - protein, 11 aa, Homo sapiens
  REGION 1..11: note = Heavy chain CDR3
ARDGWRLLDDY

SEQ ID NO: 11665 - protein, 14 aa, Homo sapiens
  REGION 1..14: note = Heavy chain CDR3
ARLYCSGGSCYSDY

SEQ ID NO: 11666 - protein, 16 aa, Homo sapiens
  REGION 1..16: note = Heavy chain CDR3
ARDPPITMVRDAPFDY

SEQ ID NO: 11667 - protein, 13 aa, Homo sapiens
  REGION 1..13: note = Heavy chain CDR3
TRTYTWNDVGWDY

SEQ ID NO: 11668 - protein, 21 aa, Homo sapiens
  REGION 1..21: note = Heavy chain CDR3
ARKGDNSYGSGSYYNEGFFDM

SEQ ID NO: 11669 - protein, 11 aa, Homo sapiens
  REGION 1..11: note = Heavy chain CDR3
ARVGLLGGMDV

SEQ ID NO: 11670 - protein, 11 aa, Homo sapiens
  REGION 1..11: note = Heavy chain CDR3
VRDGWELLGDY

SEQ ID NO: 11671 - protein, 11 aa, Homo sapiens
  REGION 1..11: note = Heavy chain CDR3
VRDGWKLLDDY

SEQ ID NO: 11672 - protein, 21 aa, Homo sapiens
  REGION 1..21: note = Heavy chain CDR3
ARKGDTSNGSGSHYNEGFFDI

SEQ ID NO: 11673 - protein, 11 aa, Homo sapiens
  REGION 1..11: note = Heavy chain CDR3
ARGGLLGATDY

SEQ ID NO: 11674 - protein, 11 aa, Homo sapiens
  REGION 1..11: note = Heavy chain CDR3
ARDGWRLLDDY

SEQ ID NO: 11675 - protein, 11 aa, Homo sapiens
  REGION 1..11: note = Heavy chain CDR3
ARGGLIGGFDF

SEQ ID NO: 11676 - protein, 16 aa, Homo sapiens
  REGION 1..16: note = Heavy chain CDR3
ARDPPITMFRGAPFDY

SEQ ID NO: 11677 - protein, 11 aa, Homo sapiens
  REGION 1..11: note = Heavy chain CDR3
ARVGLLGAMDV

SEQ ID NO: 11678 - protein, 11 aa, Homo sapiens
  REGION 1..11: note = Heavy chain CDR3
ARGGLIGGFDH

SEQ ID NO: 11679 - protein, 11 aa, Homo sapiens
  REGION 1..11: note = Heavy chain CDR3
VRGGIWGYFDY

SEQ ID NO: 11680 - protein, 13 aa, Homo sapiens
  REGION 1..13: note = Heavy chain CDR3
ARKNGYDPNGFDP

SEQ ID NO: 11681 - protein, 11 aa, Homo sapiens
  REGION 1..11: note = Heavy chain CDR3
VRDGWKLLDDY

SEQ ID NO: 11682 - protein, 10 aa, Homo sapiens
  REGION 1..10: note = Heavy chain CDR3
ARVGANWFDP

SEQ ID NO: 11683 - protein, 11 aa, Homo sapiens
  REGION 1..11: note = Heavy chain CDR3
ARGGFFGPFDY

SEQ ID NO: 11684 - protein, 11 aa, Homo sapiens
  REGION 1..11: note = Heavy chain CDR3
ARSGSLGAFDI

SEQ ID NO: 11685 - protein, 11 aa, Homo sapiens
  REGION 1..11: note = Heavy chain CDR3
ARDGWKLLDDY

SEQ ID NO: 11686 - protein, 11 aa, Homo sapiens
  REGION 1..11: note = Heavy chain CDR3
ARDGWRLLDDY

SEQ ID NO: 11687 - protein, 16 aa, Homo sapiens
  REGION 1..16: note = Heavy chain CDR3
ARDPPITMVRGAPFDY

SEQ ID NO: 11688 - protein, 11 aa, Homo sapiens
  REGION 1..11: note = Heavy chain CDR3
ARGGLLGGFDY

SEQ ID NO: 11689 - protein, 13 aa, Homo sapiens
  REGION 1..13: note = Heavy chain CDR3
ARTYNWNDVGWDY

SEQ ID NO: 11690 - protein, 11 aa, Homo sapiens
  REGION 1..11: note = Heavy chain CDR3
ARQGYMGSLDY

SEQ ID NO: 11691 - protein, 10 aa, Homo sapiens
  REGION 1..10: note = Heavy chain CDR3
ARVGANWFDP

SEQ ID NO: 11692 - protein, 11 aa, Homo sapiens
  REGION 1..11: note = Heavy chain CDR3
ARGGLLGGFDY

SEQ ID NO: 11693 - protein, 11 aa, Homo sapiens
  REGION 1..11: note = Heavy chain CDR3
VRDGWELLGDY

SEQ ID NO: 11694 - protein, 11 aa, Homo sapiens
  REGION 1..11: note = Heavy chain CDR3
ARDGWELLDDY

SEQ ID NO: 11695 - protein, 11 aa, Homo sapiens
  REGION 1..11: note = Heavy chain CDR3
ARDGWKLLDDY

SEQ ID NO: 11696 - protein, 11 aa, Homo sapiens
  REGION 1..11: note = Heavy chain CDR3
MRDGWELLGDF

SEQ ID NO: 11697 - protein, 10 aa, Homo sapiens
  REGION 1..10: note = Heavy chain CDR3
ARKSPWGFDY

SEQ ID NO: 11698 - protein, 11 aa, Homo sapiens
  REGION 1..11: note = Heavy chain CDR3
ARDGWKLLDDY

SEQ ID NO: 11699 - protein, 11 aa, Homo sapiens
  REGION 1..11: note = Heavy chain CDR3
ARDGWKLLDDY

SEQ ID NO: 11700 - protein, 11 aa, Homo sapiens
  REGION 1..11: note = Heavy chain CDR3
ARDGWKRLDDY

SEQ ID NO: 11701 - protein, 11 aa, Homo sapiens
  REGION 1..11: note = Heavy chain CDR3
ARDGWKLLDDS

SEQ ID NO: 11702 - protein, 11 aa, Homo sapiens
  REGION 1..11: note = Heavy chain CDR3
ARDGWKLLDDY

SEQ ID NO: 11703 - protein, 13 aa, Homo sapiens
  REGION 1..13: note = Heavy chain CDR3
ARTYTWNDVGWDY

SEQ ID NO: 11704 - protein, 11 aa, Homo sapiens
  REGION 1..11: note = Heavy chain CDR3
ARDGWNLLDDY

SEQ ID NO: 11705 - protein, 10 aa, Homo sapiens
  REGION 1..10: note = Heavy chain CDR3
ARKNRWGFDY

SEQ ID NO: 11706 - protein, 11 aa, Homo sapiens
  REGION 1..11: note = Heavy chain CDR3
ARDGWKLRDDY

SEQ ID NO: 11707 - protein, 21 aa, Homo sapiens
  REGION 1..21: note = Heavy chain CDR3
ARKGDNSYGSGSHYNEGFFDI

SEQ ID NO: 11708 - protein, 12 aa, Homo sapiens
  REGION 1..12: note = Heavy chain CDR3
ARGPSGPYEGDY

SEQ ID NO: 11709 - protein, 11 aa, Homo sapiens
  REGION 1..11: note = Heavy chain CDR3
VRDGWKLLDDY

SEQ ID NO: 11710 - protein, 10 aa, Homo sapiens
  REGION 1..10: note = Heavy chain CDR3
ARVGANWFDP

SEQ ID NO: 11711 - protein, 11 aa, Homo sapiens
  REGION 1..11: note = Heavy chain CDR3
TRGELLGYFDY

SEQ ID NO: 11712 - protein, 11 aa, Homo sapiens
  REGION 1..11: note = Heavy chain CDR3
ARVGRHLAFAY

SEQ ID NO: 11713 - protein, 11 aa, Homo sapiens
  REGION 1..11: note = Heavy chain CDR3
ARGHLLGYFDY

SEQ ID NO: 11714 - protein, 11 aa, Homo sapiens
  REGION 1..11: note = Heavy chain CDR3
ARGALLGAFDI

SEQ ID NO: 11715 - protein, 11 aa, Homo sapiens
  REGION 1..11: note = Heavy chain CDR3
ARGGLMGGFDY

SEQ ID NO: 11716 - protein, 11 aa, Homo sapiens
  REGION 1..11: note = Heavy chain CDR3
ARGGYFGCFDH

SEQ ID NO: 11717 - protein, 14 aa, Homo sapiens
  REGION 1..14: note = Heavy chain CDR3
AREKGIGWYEGMDV

SEQ ID NO: 11718 - protein, 11 aa, Homo sapiens
  REGION 1..11: note = Heavy chain CDR3
ARGGQLGYFDY

SEQ ID NO: 11719 - protein, 13 aa, Homo sapiens
  REGION 1..13: note = Heavy chain CDR3
ARGYRGSYGLFDY

SEQ ID NO: 11720 - protein, 14 aa, Homo sapiens
  REGION 1..14: note = Heavy chain CDR3
AKEKGIGWYEGMDV

SEQ ID NO: 11721 - protein, 11 aa, Homo sapiens
  REGION 1..11: note = Heavy chain CDR3
ARVGRFGEFDY

SEQ ID NO: 11722 - protein, 11 aa, Homo sapiens
  REGION 1..11: note = Heavy chain CDR3
TRGGYFGCFDY

SEQ ID NO: 11723 - protein, 11 aa, Homo sapiens
  REGION 1..11: note = Heavy chain CDR3
ARGGYLGAFDI

SEQ ID NO: 11724 - protein, 11 aa, Homo sapiens
  REGION 1..11: note = Heavy chain CDR3
ARGGYFGCFDY

SEQ ID NO: 11725 - protein, 11 aa, Homo sapiens
  REGION 1..11: note = Heavy chain CDR3
ARGGYFGCFDY

SEQ ID NO: 11726 - protein, 11 aa, Homo sapiens
  REGION 1..11: note = Heavy chain CDR3
ARGDLLGAFDI

SEQ ID NO: 11727 - protein, 11 aa, Homo sapiens
  REGION 1..11: note = Heavy chain CDR3
ARGGYFGCFDY

SEQ ID NO: 11728 - protein, 13 aa, Homo sapiens
  REGION 1..13: note = Heavy chain CDR3
ARLTGTTSHAFDI

SEQ ID NO: 11729 - protein, 9 aa, Homo sapiens
  REGION 1..9: note = Heavy chain CDR3
ARVGPSFDY

SEQ ID NO: 11730 - protein, 10 aa, Homo sapiens
  REGION 1..10: note = Heavy chain CDR3
ARVGVNWFDP

SEQ ID NO: 11731 - protein, 13 aa, Homo sapiens
  REGION 1..13: note = Heavy chain CDR3
ARLTGATSHAFDI

SEQ ID NO: 11732 - protein, 10 aa, Homo sapiens
  REGION 1..10: note = Heavy chain CDR3
VRVGANWFDP

SEQ ID NO: 11733 - protein, 11 aa, Homo sapiens
  REGION 1..11: note = Heavy chain CDR3
ARNQPLGSFDY

SEQ ID NO: 11734 - protein, 11 aa, Homo sapiens
  REGION 1..11: note = Heavy chain CDR3
ARGELLGYFDY

SEQ ID NO: 11735 - protein, 11 aa, Homo sapiens
  REGION 1..11: note = Heavy chain CDR3
ARGGYFGCFDH

SEQ ID NO: 11736 - protein, 10 aa, Homo sapiens
  REGION 1..10: note = Heavy chain CDR3
ARVGANWFDP

SEQ ID NO: 11737 - protein, 11 aa, Homo sapiens
  REGION 1..11: note = Heavy chain CDR3
ARVAGYDAFDI

SEQ ID NO: 11738 - protein, 10 aa, Homo sapiens
  REGION 1..10: note = Heavy chain CDR3
ARVGANWFDP

SEQ ID NO: 11739 - protein, 10 aa, Homo sapiens
  REGION 1..10: note = Heavy chain CDR3
ARVGANWFDP

SEQ ID NO: 11740 - protein, 11 aa, Homo sapiens
  REGION 1..11: note = Heavy chain CDR3
ARGALLGAFDI

SEQ ID NO: 11741 - protein, 10 aa, Homo sapiens
  REGION 1..10: note = Heavy chain CDR3
ARVGANWFDP

SEQ ID NO: 11742 - protein, 11 aa, Homo sapiens
  REGION 1..11: note = Heavy chain CDR3
ARGGYFGCFDY

SEQ ID NO: 11743 - protein, 11 aa, Homo sapiens
  REGION 1..11: note = Heavy chain CDR3
TRGELLGYFDY

SEQ ID NO: 11744 - protein, 17 aa, Homo sapiens
  REGION 1..17: note = Heavy chain CDR3
ARDPVTMVRGVHWYFDL

SEQ ID NO: 11745 - protein, 11 aa, Homo sapiens
  REGION 1..11: note = Heavy chain CDR3
TRGELLGYFDY

SEQ ID NO: 11746 - protein, 11 aa, Homo sapiens
  REGION 1..11: note = Heavy chain CDR3
ARVGRHLAFAY

SEQ ID NO: 11747 - protein, 11 aa, Homo sapiens
  REGION 1..11: note = Heavy chain CDR3
ARGALLGAFEI

SEQ ID NO: 11748 - protein, 11 aa, Homo sapiens
  REGION 1..11: note = Heavy chain CDR3
ARGELLGYFDY

SEQ ID NO: 11749 - protein, 11 aa, Homo sapiens
  REGION 1..11: note = Heavy chain CDR3
ARGGYFGCFDY

SEQ ID NO: 11750 - protein, 11 aa, Homo sapiens
  REGION 1..11: note = Heavy chain CDR3
ARGGYFGCFDY

SEQ ID NO: 11751 - protein, 11 aa, Homo sapiens
  REGION 1..11: note = Heavy chain CDR3
ARGALLGGFDY

SEQ ID NO: 11752 - protein, 11 aa, Homo sapiens
  REGION 1..11: note = Heavy chain CDR3
ARGGELGPFDY

SEQ ID NO: 11753 - protein, 11 aa, Homo sapiens
  REGION 1..11: note = Heavy chain CDR3
ARAGNWGAFDI

SEQ ID NO: 11754 - protein, 11 aa, Homo sapiens
  REGION 1..11: note = Heavy chain CDR3
ARGGLTGDFDY

SEQ ID NO: 11755 - protein, 11 aa, Homo sapiens
  REGION 1..11: note = Heavy chain CDR3
ARGGSYGAFDI

SEQ ID NO: 11756 - protein, 11 aa, Homo sapiens
  REGION 1..11: note = Heavy chain CDR3
ARGELLGYFDN

SEQ ID NO: 11757 - protein, 11 aa, Homo sapiens
  REGION 1..11: note = Heavy chain CDR3
ARGELLGYFDS

SEQ ID NO: 11758 - protein, 11 aa, Homo sapiens
  REGION 1..11: note = Heavy chain CDR3
ARGGLLGHFDY

SEQ ID NO: 11759 - protein, 11 aa, Homo sapiens
  REGION 1..11: note = Heavy chain CDR3
ARGELLGYFDY

SEQ ID NO: 11760 - protein, 11 aa, Homo sapiens
  REGION 1..11: note = Heavy chain CDR3
ARGGLLGHFDY

SEQ ID NO: 11761 - protein, 11 aa, Homo sapiens
  REGION 1..11: note = Heavy chain CDR3
ARGGRLGAFDY

SEQ ID NO: 11762 - protein, 11 aa, Homo sapiens
  REGION 1..11: note = Heavy chain CDR3
ARGGLLGYFDY

SEQ ID NO: 11763 - protein, 11 aa, Homo sapiens
  REGION 1..11: note = Heavy chain CDR3
ARGDLLGSFDY

SEQ ID NO: 11764 - protein, 11 aa, Homo sapiens
  REGION 1..11: note = Heavy chain CDR3
ARGELLGYFDY

SEQ ID NO: 11765 - protein, 11 aa, Homo sapiens
  REGION 1..11: note = Heavy chain CDR3
VRGELLGYFDY

SEQ ID NO: 11766 - protein, 13 aa, Homo sapiens
  REGION 1..13: note = Heavy chain CDR3
ARGSILAAGIFDY

SEQ ID NO: 11767 - protein, 11 aa, Homo sapiens
  REGION 1..11: note = Heavy chain CDR3
ARGGDWGAFDI

SEQ ID NO: 11768 - protein, 10 aa, Homo sapiens
  REGION 1..10: note = Heavy chain CDR3
ARSIVGAFDF

SEQ ID NO: 11769 - protein, 11 aa, Homo sapiens
  REGION 1..11: note = Heavy chain CDR3
ARGGLTGGFDY

SEQ ID NO: 11770 - protein, 11 aa, Homo sapiens
  REGION 1..11: note = Heavy chain CDR3
ARGGFFGCFDY

SEQ ID NO: 11771 - protein, 11 aa, Homo sapiens
  REGION 1..11: note = Heavy chain CDR3
ARGGYLGAFDI

SEQ ID NO: 11772 - protein, 11 aa, Homo sapiens
  REGION 1..11: note = Heavy chain CDR3
ARGSKLGPFDY

SEQ ID NO: 11773 - protein, 11 aa, Homo sapiens
  REGION 1..11: note = Heavy chain CDR3
ARGGYYGAFDI

SEQ ID NO: 11774 - protein, 11 aa, Homo sapiens
  REGION 1..11: note = Heavy chain CDR3
ARGDLLGSFDY

SEQ ID NO: 11775 - protein, 11 aa, Homo sapiens
  REGION 1..11: note = Heavy chain CDR3
ARGHLLGSFDY

SEQ ID NO: 11776 - protein, 13 aa, Homo sapiens
  REGION 1..13: note = Heavy chain CDR3
ARGYRGSYGLFDY

SEQ ID NO: 11777 - protein, 11 aa, Homo sapiens
  REGION 1..11: note = Heavy chain CDR3
ARGHLLGYFDY

SEQ ID NO: 11778 - protein, 17 aa, Homo sapiens
  REGION 1..17: note = Heavy chain CDR3
AKDLLRYFDWLLSPFDY

SEQ ID NO: 11779 - protein, 11 aa, Homo sapiens
  REGION 1..11: note = Heavy chain CDR3
ARGGYYGAFDI

SEQ ID NO: 11780 - protein, 17 aa, Homo sapiens
  REGION 1..17: note = Heavy chain CDR3
AREDDILTAYYYYGMDV

SEQ ID NO: 11781 - protein, 11 aa, Homo sapiens
  REGION 1..11: note = Heavy chain CDR3
ARGGYYGPFDI

SEQ ID NO: 11782 - protein, 11 aa, Homo sapiens
  REGION 1..11: note = Heavy chain CDR3
ARGGLMGGFDY

SEQ ID NO: 11783 - protein, 10 aa, Homo sapiens
  REGION 1..10: note = Heavy chain CDR3
ARSIVGAFDY

SEQ ID NO: 11784 - protein, 13 aa, Homo sapiens
  REGION 1..13: note = Heavy chain CDR3
ARGYSGSYGLFDY

SEQ ID NO: 11785 - protein, 11 aa, Homo sapiens
  REGION 1..11: note = Heavy chain CDR3
ARGGYFGCFDH

SEQ ID NO: 11786 - protein, 11 aa, Homo sapiens
  REGION 1..11: note = Heavy chain CDR3
ARNQPLGSFDY

SEQ ID NO: 11787 - protein, 17 aa, Homo sapiens
  REGION 1..17: note = Heavy chain CDR3
ARDRGTYYDYYYYGMDV

SEQ ID NO: 11788 - protein, 15 aa, Homo sapiens
  REGION 1..15: note = Heavy chain CDR3
ARDDDILTGLYGMDV

SEQ ID NO: 11789 - protein, 17 aa, Homo sapiens
  REGION 1..17: note = Heavy chain CDR3
ARDRGTYYDYYYYGMDV

SEQ ID NO: 11790 - protein, 18 aa, Homo sapiens
  REGION 1..18: note = Heavy chain CDR3
ARDRYYYGSGRYYRYLDL

SEQ ID NO: 11791 - protein, 14 aa, Homo sapiens
  REGION 1..14: note = Heavy chain CDR3
ARDRGSGNYEYFDL

SEQ ID NO: 11792 - protein, 14 aa, Homo sapiens
  REGION 1..14: note = Heavy chain CDR3
ARIGRIAAAGSIDY

SEQ ID NO: 11793 - protein, 11 aa, Homo sapiens
  REGION 1..11: note = Heavy chain CDR3
ARAGNWGAFDI

SEQ ID NO: 11794 - protein, 11 aa, Homo sapiens
  REGION 1..11: note = Heavy chain CDR3
ARGGLTGAFDI

SEQ ID NO: 11795 - protein, 11 aa, Homo sapiens
  REGION 1..11: note = Heavy chain CDR3
ARGALLGGFDY

SEQ ID NO: 11796 - protein, 9 aa, Homo sapiens
  REGION 1..9: note = Heavy chain CDR3
ARVGPHFDY

SEQ ID NO: 11797 - protein, 11 aa, Homo sapiens
  REGION 1..11: note = Heavy chain CDR3
ARGGLLGSFDY

SEQ ID NO: 11798 - protein, 12 aa, Homo sapiens
  REGION 1..12: note = Heavy chain CDR3
ARGANWGPHFDY

SEQ ID NO: 11799 - protein, 11 aa, Homo sapiens
  REGION 1..11: note = Heavy chain CDR3
ARGALLGAFDI

SEQ ID NO: 11800 - protein, 9 aa, Homo sapiens
  REGION 1..9: note = Heavy chain CDR3
ARGPPTLHY

SEQ ID NO: 11801 - protein, 13 aa, Homo sapiens
  REGION 1..13: note = Heavy chain CDR3
ARGGLWFGEFLDY

SEQ ID NO: 11802 - protein, 11 aa, Homo sapiens
  REGION 1..11: note = Heavy chain CDR3
VRGDLLGSFDY

SEQ ID NO: 11803 - protein, 14 aa, Homo sapiens
  REGION 1..14: note = Heavy chain CDR3
ARDKVLLWFGEFDY

SEQ ID NO: 11804 - protein, 11 aa, Homo sapiens
  REGION 1..11: note = Heavy chain CDR3
SFRYTYGPFDY

SEQ ID NO: 11805 - protein, 11 aa, Homo sapiens
  REGION 1..11: note = Heavy chain CDR3
VRSGLVTPFDY

SEQ ID NO: 11806 - protein, 10 aa, Homo sapiens
  REGION 1..10: note = Heavy chain CDR3
ARVGGATIDY

SEQ ID NO: 11807 - protein, 11 aa, Homo sapiens
  REGION 1..11: note = Heavy chain CDR3
ARGGLTGDFNY

SEQ ID NO: 11808 - protein, 11 aa, Homo sapiens
  REGION 1..11: note = Heavy chain CDR3
ARGGLLGCFDY

SEQ ID NO: 11809 - protein, 16 aa, Homo sapiens
  REGION 1..16: note = Heavy chain CDR3
ARGGGLLWFGGIGMDV

SEQ ID NO: 11810 - protein, 11 aa, Homo sapiens
  REGION 1..11: note = Heavy chain CDR3
SRGELLGYFDY

SEQ ID NO: 11811 - protein, 11 aa, Homo sapiens
  REGION 1..11: note = Heavy chain CDR3
TRGELLGYFDY

SEQ ID NO: 11812 - protein, 11 aa, Homo sapiens
  REGION 1..11: note = Heavy chain CDR3
ARGGSYGAFDI

SEQ ID NO: 11813 - protein, 11 aa, Homo sapiens
  REGION 1..11: note = Heavy chain CDR3
ARGELLGYLDY

SEQ ID NO: 11814 - protein, 11 aa, Homo sapiens
  REGION 1..11: note = Heavy chain CDR3
ARGGYFGCFDF

SEQ ID NO: 11815 - protein, 15 aa, Homo sapiens
  REGION 1..15: note = Heavy chain CDR3
ARDDDILTGLYGMDV

SEQ ID NO: 11816 - protein, 11 aa, Homo sapiens
  REGION 1..11: note = Heavy chain CDR3
ARGGYYGAFDI

SEQ ID NO: 11817 - protein, 11 aa, Homo sapiens
  REGION 1..11: note = Heavy chain CDR3
VRGELLGYFDN

SEQ ID NO: 11818 - protein, 11 aa, Homo sapiens
  REGION 1..11: note = Heavy chain CDR3
ARGGYFGCFDY

SEQ ID NO: 11819 - protein, 11 aa, Homo sapiens
  REGION 1..11: note = Heavy chain CDR3
ARGELLGYFDY

SEQ ID NO: 11820 - protein, 11 aa, Homo sapiens
  REGION 1..11: note = Heavy chain CDR3
LTVAGPHVFDY

SEQ ID NO: 11821 - protein, 11 aa, Homo sapiens
  REGION 1..11: note = Heavy chain CDR3
ARGGYFGCFDY

SEQ ID NO: 11822 - protein, 11 aa, Homo sapiens
  REGION 1..11: note = Heavy chain CDR3
TRGELLGYFDY

SEQ ID NO: 11823 - protein, 11 aa, Homo sapiens
  REGION 1..11: note = Heavy chain CDR3
ARGGYFGCFDY

SEQ ID NO: 11824 - protein, 11 aa, Homo sapiens
  REGION 1..11: note = Heavy chain CDR3
ARGSKLGPFDY

SEQ ID NO: 11825 - protein, 11 aa, Homo sapiens
  REGION 1..11: note = Heavy chain CDR3
ARGGYFGCFDQ

SEQ ID NO: 11826 - protein, 11 aa, Homo sapiens
  REGION 1..11: note = Heavy chain CDR3
ARGGYFGCFDY

SEQ ID NO: 11827 - protein, 11 aa, Homo sapiens
  REGION 1..11: note = Heavy chain CDR3
ARGDLLGYFDY

SEQ ID NO: 11828 - protein, 11 aa, Homo sapiens
  REGION 1..11: note = Heavy chain CDR3
ARGELLGYFDY

SEQ ID NO: 11829 - protein, 11 aa, Homo sapiens
  REGION 1..11: note = Heavy chain CDR3
ARAGNWGAFDI

SEQ ID NO: 11830 - protein, 11 aa, Homo sapiens
  REGION 1..11: note = Heavy chain CDR3
VRGELLGYFDN

SEQ ID NO: 11831 - protein, 11 aa, Homo sapiens
  REGION 1..11: note = Heavy chain CDR3
ARGGYFGCFDH

SEQ ID NO: 11832 - protein, 11 aa, Homo sapiens
  REGION 1..11: note = Heavy chain CDR3
ARGELLGYFDN

SEQ ID NO: 11833 - protein, 14 aa, Homo sapiens
  REGION 1..14: note = Heavy chain CDR3
AREKGSGWYEGMDV

SEQ ID NO: 11834 - protein, 11 aa, Homo sapiens
  REGION 1..11: note = Heavy chain CDR3
ARGAKLGPFDY

SEQ ID NO: 11835 - protein, 11 aa, Homo sapiens
  REGION 1..11: note = Heavy chain CDR3
ARGGRLGAFDY

SEQ ID NO: 11836 - protein, 11 aa, Homo sapiens
  REGION 1..11: note = Heavy chain CDR3
ARGGYLGAFDI

SEQ ID NO: 11837 - protein, 11 aa, Homo sapiens
  REGION 1..11: note = Heavy chain CDR3
TRGELLGHFDY

SEQ ID NO: 11838 - protein, 11 aa, Homo sapiens
  REGION 1..11: note = Heavy chain CDR3
ARGGYFGCFDP

SEQ ID NO: 11839 - protein, 11 aa, Homo sapiens
  REGION 1..11: note = Heavy chain CDR3
ARGGYFGCFDS

SEQ ID NO: 11840 - protein, 11 aa, Homo sapiens
  REGION 1..11: note = Heavy chain CDR3
ARGELLGYFDY

SEQ ID NO: 11841 - protein, 11 aa, Homo sapiens
  REGION 1..11: note = Heavy chain CDR3
ARGGYFGCFDY

SEQ ID NO: 11842 - protein, 11 aa, Homo sapiens
  REGION 1..11: note = Heavy chain CDR3
TRGELLGYVDY

SEQ ID NO: 11843 - protein, 11 aa, Homo sapiens
  REGION 1..11: note = Heavy chain CDR3
TRGELLGYFDY

SEQ ID NO: 11844 - protein, 11 aa, Homo sapiens
  REGION 1..11: note = Heavy chain CDR3
ARGGYFGCVDY

SEQ ID NO: 11845 - protein, 11 aa, Homo sapiens
  REGION 1..11: note = Heavy chain CDR3
TRGDLLGYFDY

SEQ ID NO: 11846 - protein, 12 aa, Homo sapiens
  REGION 1..12: note = Heavy chain CDR3
ARGGLLGPYFDY

SEQ ID NO: 11847 - protein, 12 aa, Homo sapiens
  REGION 1..12: note = Heavy chain CDR3
ARGGDWGPYFDY

SEQ ID NO: 11848 - protein, 12 aa, Homo sapiens
  REGION 1..12: note = Heavy chain CDR3
ARGGVWGPYFDY

SEQ ID NO: 11849 - protein, 11 aa, Homo sapiens
  REGION 1..11: note = Heavy chain CDR3
ARAGDLGAFDI

SEQ ID NO: 11850 - protein, 10 aa, Homo sapiens
  REGION 1..10: note = Heavy chain CDR3
ARVGAGDWDY

SEQ ID NO: 11851 - protein, 11 aa, Homo sapiens
  REGION 1..11: note = Heavy chain CDR3
ARAHYFGAFDI

SEQ ID NO: 11852 - protein, 11 aa, Homo sapiens
  REGION 1..11: note = Heavy chain CDR3
AKDLLWLGFDY

SEQ ID NO: 11853 - protein, 12 aa, Homo sapiens
  REGION 1..12: note = Heavy chain CDR3
ARGGDWGPYFDY

SEQ ID NO: 11854 - protein, 11 aa, Homo sapiens
  REGION 1..11: note = Heavy chain CDR3
ARNGLIGAFDI

SEQ ID NO: 11855 - protein, 11 aa, Homo sapiens
  REGION 1..11: note = Heavy chain CDR3
ARAGHLGAFDI

SEQ ID NO: 11856 - protein, 11 aa, Homo sapiens
  REGION 1..11: note = Heavy chain CDR3
ARAGDLGAFDI

SEQ ID NO: 11857 - protein, 11 aa, Homo sapiens
  REGION 1..11: note = Heavy chain CDR3
AKLGIAWYFDV

SEQ ID NO: 11858 - protein, 11 aa, Homo sapiens
  REGION 1..11: note = Heavy chain CDR3
ARAGDLAAFDI

SEQ ID NO: 11859 - protein, 11 aa, Homo sapiens
  REGION 1..11: note = Heavy chain CDR3
ARGGQLGPFDY

SEQ ID NO: 11860 - protein, 9 aa, Homo sapiens
  REGION 1..9: note = Heavy chain CDR3
ARWVRGVDY

SEQ ID NO: 11861 - protein, 12 aa, Homo sapiens
  REGION 1..12: note = Heavy chain CDR3
ARGEYFGEFFDY

SEQ ID NO: 11862 - protein, 11 aa, Homo sapiens
  REGION 1..11: note = Heavy chain CDR3
ARASLTGSFDY

SEQ ID NO: 11863 - protein, 11 aa, Homo sapiens
  REGION 1..11: note = Heavy chain CDR3
VRAGYLGAFDI

SEQ ID NO: 11864 - protein, 16 aa, Homo sapiens
  REGION 1..16: note = Heavy chain CDR3
ARAPHYAILTGYYEDY

SEQ ID NO: 11865 - protein, 13 aa, Homo sapiens
  REGION 1..13: note = Heavy chain CDR3
ARDYYDSSGYFDY

SEQ ID NO: 11866 - protein, 11 aa, Homo sapiens
  REGION 1..11: note = Heavy chain CDR3
ARVTGRDAFDI

SEQ ID NO: 11867 - protein, 13 aa, Homo sapiens
  REGION 1..13: note = Heavy chain CDR3
ARGGILAAGIFDY

SEQ ID NO: 11868 - protein, 15 aa, Homo sapiens
  REGION 1..15: note = Heavy chain CDR3
ARMLRGAPYYYGMDV

SEQ ID NO: 11869 - protein, 11 aa, Homo sapiens
  REGION 1..11: note = Heavy chain CDR3
ARASLTGSFDY

SEQ ID NO: 11870 - protein, 10 aa, Homo sapiens
  REGION 1..10: note = Heavy chain CDR3
ARVGPINLDY

SEQ ID NO: 11871 - protein, 11 aa, Homo sapiens
  REGION 1..11: note = Heavy chain CDR3
ARGSQLGPFDY

SEQ ID NO: 11872 - protein, 12 aa, Homo sapiens
  REGION 1..12: note = Heavy chain CDR3
ARGGLLGPYFDY

SEQ ID NO: 11873 - protein, 12 aa, Homo sapiens
  REGION 1..12: note = Heavy chain CDR3
ARGDILTGYYGY

SEQ ID NO: 11874 - protein, 12 aa, Homo sapiens
  REGION 1..12: note = Heavy chain CDR3
ARGGVWGSYFDY

SEQ ID NO: 11875 - protein, 12 aa, Homo sapiens
  REGION 1..12: note = Heavy chain CDR3
ARGGLLGPYFDY

SEQ ID NO: 11876 - protein, 10 aa, Homo sapiens
  REGION 1..10: note = Heavy chain CDR3
ARVGPTNLDY

SEQ ID NO: 11877 - protein, 9 aa, Homo sapiens
  REGION 1..9: note = Heavy chain CDR3
AKVSGYFDY

SEQ ID NO: 11878 - protein, 16 aa, Homo sapiens
  REGION 1..16: note = Heavy chain CDR3
ARAPHYGILTGYYEDY

SEQ ID NO: 11879 - protein, 11 aa, Homo sapiens
  REGION 1..11: note = Heavy chain CDR3
ARAGYLGAFDI

SEQ ID NO: 11880 - protein, 11 aa, Homo sapiens
  REGION 1..11: note = Heavy chain CDR3
ARGGLTGPFDY

SEQ ID NO: 11881 - protein, 11 aa, Homo sapiens
  REGION 1..11: note = Heavy chain CDR3
ARGGYWGSFDY

SEQ ID NO: 11882 - protein, 11 aa, Homo sapiens
  REGION 1..11: note = Heavy chain CDR3
ARAHYFGAFDI

SEQ ID NO: 11883 - protein, 10 aa, Homo sapiens
  REGION 1..10: note = Heavy chain CDR3
ARVRGGGLDV

SEQ ID NO: 11884 - protein, 11 aa, Homo sapiens
  REGION 1..11: note = Heavy chain CDR3
SRSGSFGAFDI

SEQ ID NO: 11885 - protein, 13 aa, Homo sapiens
  REGION 1..13: note = Heavy chain CDR3
ARGGILAAGIFDY

SEQ ID NO: 11886 - protein, 11 aa, Homo sapiens
  REGION 1..11: note = Heavy chain CDR3
ARAGELGPFDY

SEQ ID NO: 11887 - protein, 13 aa, Homo sapiens
  REGION 1..13: note = Heavy chain CDR3
VRGSIVAAGLFDY

SEQ ID NO: 11888 - protein, 15 aa, Homo sapiens
  REGION 1..15: note = Heavy chain CDR3
ARDYYGSGSPRHFDY

SEQ ID NO: 11889 - protein, 11 aa, Homo sapiens
  REGION 1..11: note = Heavy chain CDR3
ARVHYFGAFDI

SEQ ID NO: 11890 - protein, 10 aa, Homo sapiens
  REGION 1..10: note = Heavy chain CDR3
ARVAAAGFDY

SEQ ID NO: 11891 - protein, 11 aa, Homo sapiens
  REGION 1..11: note = Heavy chain CDR3
ARNSLLTGWDY

SEQ ID NO: 11892 - protein, 12 aa, Homo sapiens
  REGION 1..12: note = Heavy chain CDR3
ARGGLLGPYFDY

SEQ ID NO: 11893 - protein, 10 aa, Homo sapiens
  REGION 1..10: note = Heavy chain CDR3
ARLGKGLFDY

SEQ ID NO: 11894 - protein, 12 aa, Homo sapiens
  REGION 1..12: note = Heavy chain CDR3
ARGGVWGSYFDY

SEQ ID NO: 11895 - protein, 17 aa, Homo sapiens
  REGION 1..17: note = Heavy chain CDR3
ARDRYDILTGPYWYFDL

SEQ ID NO: 11896 - protein, 11 aa, Homo sapiens
  REGION 1..11: note = Heavy chain CDR3
ARVGVRGIFDY

SEQ ID NO: 11897 - protein, 10 aa, Homo sapiens
  REGION 1..10: note = Heavy chain CDR3
ARVRGGGMDV

SEQ ID NO: 11898 - protein, 12 aa, Homo sapiens
  REGION 1..12: note = Heavy chain CDR3
ARGGLLGPYFDY

SEQ ID NO: 11899 - protein, 12 aa, Homo sapiens
  REGION 1..12: note = Heavy chain CDR3
ARGGVWGPYFDY

SEQ ID NO: 11900 - protein, 13 aa, Homo sapiens
  REGION 1..13: note = Heavy chain CDR3
ARGGIVAAGILDY

SEQ ID NO: 11901 - protein, 9 aa, Homo sapiens
  REGION 1..9: note = Heavy chain CDR3
ARVAPYFDY

SEQ ID NO: 11902 - protein, 9 aa, Homo sapiens
  REGION 1..9: note = Heavy chain CDR3
ARFIYGMDV

SEQ ID NO: 11903 - protein, 10 aa, Homo sapiens
  REGION 1..10: note = Heavy chain CDR3
ARVGATNLDY

SEQ ID NO: 11904 - protein, 11 aa, Homo sapiens
  REGION 1..11: note = Heavy chain CDR3
ARAGHLGPFDY

SEQ ID NO: 11905 - protein, 11 aa, Homo sapiens
  REGION 1..11: note = Heavy chain CDR3
ARAGLLGYFDY

SEQ ID NO: 11906 - protein, 11 aa, Homo sapiens
  REGION 1..11: note = Heavy chain CDR3
ARGGHLGSFDY

SEQ ID NO: 11907 - protein, 10 aa, Homo sapiens
  REGION 1..10: note = Heavy chain CDR3
ARVRGGGVDV

SEQ ID NO: 11908 - protein, 11 aa, Homo sapiens
  REGION 1..11: note = Heavy chain CDR3
ARSGSFGAFDI

SEQ ID NO: 11909 - protein, 9 aa, Homo sapiens
  REGION 1..9: note = Heavy chain CDR3
ARLGHYIDY

SEQ ID NO: 11910 - protein, 11 aa, Homo sapiens
  REGION 1..11: note = Heavy chain CDR3
ARAGLWSAFDI

SEQ ID NO: 11911 - protein, 11 aa, Homo sapiens
  REGION 1..11: note = Heavy chain CDR3
ARQDYWGPFDY

SEQ ID NO: 11912 - protein, 10 aa, Homo sapiens
  REGION 1..10: note = Heavy chain CDR3
ARVGIGAFDI

SEQ ID NO: 11913 - protein, 12 aa, Homo sapiens
  REGION 1..12: note = Heavy chain CDR3
ARGGDWGPYFDY

SEQ ID NO: 11914 - protein, 16 aa, Homo sapiens
  REGION 1..16: note = Heavy chain CDR3
ASAYYDLLTGPYYFDY

SEQ ID NO: 11915 - protein, 11 aa, Homo sapiens
  REGION 1..11: note = Heavy chain CDR3
ARAGDLGAFDI

SEQ ID NO: 11916 - protein, 12 aa, Homo sapiens
  REGION 1..12: note = Heavy chain CDR3
ARGEWFGEFFDY

SEQ ID NO: 11917 - protein, 10 aa, Homo sapiens
  REGION 1..10: note = Heavy chain CDR3
ARSIVGAFDY

SEQ ID NO: 11918 - protein, 11 aa, Homo sapiens
  REGION 1..11: note = Heavy chain CDR3
ARGHYFGAFDI

SEQ ID NO: 11919 - protein, 12 aa, Homo sapiens
  REGION 1..12: note = Heavy chain CDR3
ARGGLLGPYFDY

SEQ ID NO: 11920 - protein, 17 aa, Homo sapiens
  REGION 1..17: note = Heavy chain CDR3
AREDYYGSGRNYYGMDV

SEQ ID NO: 11921 - protein, 11 aa, Homo sapiens
  REGION 1..11: note = Heavy chain CDR3
ARAGELGPFDY

SEQ ID NO: 11922 - protein, 11 aa, Homo sapiens
  REGION 1..11: note = Heavy chain CDR3
ARAHYFGAFDI

SEQ ID NO: 11923 - protein, 12 aa, Homo sapiens
  REGION 1..12: note = Heavy chain CDR3
ARGGDWGPYFDY

SEQ ID NO: 11924 - protein, 11 aa, Homo sapiens
  REGION 1..11: note = Heavy chain CDR3
ARAGDLGAFDI

SEQ ID NO: 11925 - protein, 12 aa, Homo sapiens
  REGION 1..12: note = Heavy chain CDR3
ARGGVWGSYFDY

SEQ ID NO: 11926 - protein, 11 aa, Homo sapiens
  REGION 1..11: note = Heavy chain CDR3
ARGSLLGPFDY

SEQ ID NO: 11927 - protein, 9 aa, Homo sapiens
  REGION 1..9: note = Heavy chain CDR3
GRWVRGVEY

SEQ ID NO: 11928 - protein, 12 aa, Homo sapiens
  REGION 1..12: note = Heavy chain CDR3
ARGGDWGPYFDY

SEQ ID NO: 11929 - protein, 15 aa, Homo sapiens
  REGION 1..15: note = Heavy chain CDR3
ARMLRGAPYYYGMDV

SEQ ID NO: 11930 - protein, 12 aa, Homo sapiens
  REGION 1..12: note = Heavy chain CDR3
ARGEFFGEFFDY

SEQ ID NO: 11931 - protein, 11 aa, Homo sapiens
  REGION 1..11: note = Heavy chain CDR3
ARAGDLGAFDI

SEQ ID NO: 11932 - protein, 16 aa, Homo sapiens
  REGION 1..16: note = Heavy chain CDR3
AREVRVRGVIIPFFDY

SEQ ID NO: 11933 - protein, 16 aa, Homo sapiens
  REGION 1..16: note = Heavy chain CDR3
AREVRVRGVIIPFFDY

SEQ ID NO: 11934 - protein, 22 aa, Homo sapiens
  REGION 1..22: note = Heavy chain CDR3
AGTYYYGSGSYSGYYYYYGMDV

SEQ ID NO: 11935 - protein, 12 aa, Homo sapiens
  REGION 1..12: note = Heavy chain CDR3
ARGGVWGSYFDY

SEQ ID NO: 11936 - protein, 11 aa, Homo sapiens
  REGION 1..11: note = Heavy chain CDR3
ARGGLLGPFDY

SEQ ID NO: 11937 - protein, 11 aa, Homo sapiens
  REGION 1..11: note = Heavy chain CDR3
ARAGLLGYFDY

SEQ ID NO: 11938 - protein, 11 aa, Homo sapiens
  REGION 1..11: note = Heavy chain CDR3
ARGGLIGPFDY

SEQ ID NO: 11939 - protein, 11 aa, Homo sapiens
  REGION 1..11: note = Heavy chain CDR3
ARGGHLGSFDY

SEQ ID NO: 11940 - protein, 11 aa, Homo sapiens
  REGION 1..11: note = Heavy chain CDR3
ARGGLMGAFDY

SEQ ID NO: 11941 - protein, 12 aa, Homo sapiens
  REGION 1..12: note = Heavy chain CDR3
ARGGDWGPYFDY

SEQ ID NO: 11942 - protein, 9 aa, Homo sapiens
  REGION 1..9: note = Heavy chain CDR3
GRWVRGVEY

SEQ ID NO: 11943 - protein, 11 aa, Homo sapiens
  REGION 1..11: note = Heavy chain CDR3
ARAGHLGPFDY

SEQ ID NO: 11944 - protein, 12 aa, Homo sapiens
  REGION 1..12: note = Heavy chain CDR3
ARGGLLGPYFDY

SEQ ID NO: 11945 - protein, 16 aa, Homo sapiens
  REGION 1..16: note = Heavy chain CDR3
ASAYYDILTGPYYFDY

SEQ ID NO: 11946 - protein, 12 aa, Homo sapiens
  REGION 1..12: note = Heavy chain CDR3
ARGGVWGPYFDY

SEQ ID NO: 11947 - protein, 11 aa, Homo sapiens
  REGION 1..11: note = Heavy chain CDR3
ARAGELGPFDY

SEQ ID NO: 11948 - protein, 12 aa, Homo sapiens
  REGION 1..12: note = Heavy chain CDR3
ARGGLLGPYFDY

SEQ ID NO: 11949 - protein, 13 aa, Homo sapiens
  REGION 1..13: note = Heavy chain CDR3
ARRSAYDPYYFDY

SEQ ID NO: 11950 - protein, 11 aa, Homo sapiens
  REGION 1..11: note = Heavy chain CDR3
ARGGLTGPFDY

SEQ ID NO: 11951 - protein, 9 aa, Homo sapiens
  REGION 1..9: note = Heavy chain CDR3
GRWVRGVEY

SEQ ID NO: 11952 - protein, 11 aa, Homo sapiens
  REGION 1..11: note = Heavy chain CDR3
ARAHYFGAFDI

SEQ ID NO: 11953 - protein, 9 aa, Homo sapiens
  REGION 1..9: note = Heavy chain CDR3
GRWVRGVEY

SEQ ID NO: 11954 - protein, 11 aa, Homo sapiens
  REGION 1..11: note = Heavy chain CDR3
ARAHYFGAFDI

SEQ ID NO: 11955 - protein, 12 aa, Homo sapiens
  REGION 1..12: note = Heavy chain CDR3
ARGGVWGSYFDY

SEQ ID NO: 11956 - protein, 13 aa, Homo sapiens
  REGION 1..13: note = Heavy chain CDR3
ARGGILAAGIFDY

SEQ ID NO: 11957 - protein, 13 aa, Homo sapiens
  REGION 1..13: note = Heavy chain CDR3
ARGSVVAAGLFDY

SEQ ID NO: 11958 - protein, 12 aa, Homo sapiens
  REGION 1..12: note = Heavy chain CDR3
ARGGVWGSYFDY

SEQ ID NO: 11959 - protein, 13 aa, Homo sapiens
  REGION 1..13: note = Heavy chain CDR3
ARRSAYDPYYFDY

SEQ ID NO: 11960 - protein, 9 aa, Homo sapiens
  REGION 1..9: note = Heavy chain CDR3
AKVSGYFDY

SEQ ID NO: 11961 - protein, 12 aa, Homo sapiens
  REGION 1..12: note = Heavy chain CDR3
ARGGVWGSYFDY

SEQ ID NO: 11962 - protein, 12 aa, Homo sapiens
  REGION 1..12: note = Heavy chain CDR3
ARGGDWGPYFDY

SEQ ID NO: 11963 - protein, 11 aa, Homo sapiens
  REGION 1..11: note = Heavy chain CDR3
ARAGDLGAFDI

SEQ ID NO: 11964 - protein, 11 aa, Homo sapiens
  REGION 1..11: note = Heavy chain CDR3
ARAGHLGAFDI

SEQ ID NO: 11965 - protein, 12 aa, Homo sapiens
  REGION 1..12: note = Heavy chain CDR3
ARGGDWGPYFDY

SEQ ID NO: 11966 - protein, 11 aa, Homo sapiens
  REGION 1..11: note = Heavy chain CDR3
ARAGELGPFDY

SEQ ID NO: 11967 - protein, 11 aa, Homo sapiens
  REGION 1..11: note = Heavy chain CDR3
ARAGELGPFDY

SEQ ID NO: 11968 - protein, 5 aa, synthetic construct
  REGION 1..5: note = Description of Artificial Sequence: Synthetic peptide
  REGION 1..5: note = See specification as filed for detailed description of substitutions and preferred embodiments
GGGGS

SEQ ID NO: 11969 - protein, 5 aa, Homo sapiens
CPSCP

SEQ ID NO: 11970 - protein, 5 aa, Homo sapiens
CPPCP

SEQ ID NO: 11971 - protein, 9 aa, Homo sapiens
QQRSNWPLT

SEQ ID NO: 11972 - protein, 13 aa, Homo sapiens
ARDRGASRGAFNI

SEQ ID NO: 11973 - protein, 10 aa, Homo sapiens
QQYGSSPPIT

SEQ ID NO: 11974 - protein, 11 aa, Homo sapiens
AISSWYGFFQN

SEQ ID NO: 11975 - protein, 9 aa, Homo sapiens
QQYGSSPYT

SEQ ID NO: 11976 - protein, 15 aa, Homo sapiens
AREGGAYYYFYGMDV

SEQ ID NO: 11977 - protein, 9 aa, Homo sapiens
QQRSNWPFT

SEQ ID NO: 11978 - protein, 15 aa, Homo sapiens
ARGRPTDYYYYGVDV

SEQ ID NO: 11979 - protein, 9 aa, Homo sapiens
QQANSFPLT

SEQ ID NO: 11980 - protein, 13 aa, Homo sapiens
ARDSTLGRGYFDL

SEQ ID NO: 11981 - protein, 9 aa, Homo sapiens
QQRSNWPLT

SEQ ID NO: 11982 - protein, 13 aa, Homo sapiens
ARDRGASRGAFNI

SEQ ID NO: 11983 - protein, 9 aa, Homo sapiens
QQRSNWPLT

SEQ ID NO: 11984 - protein, 11 aa, Homo sapiens
AISSWYGFFQN

SEQ ID NO: 11985 - protein, 9 aa, Homo sapiens
QQRSNWPLT

SEQ ID NO: 11986 - protein, 15 aa, Homo sapiens
AREGGAYYYFYGMDV

SEQ ID NO: 11987 - protein, 10 aa, Homo sapiens
QQYGSSPPIT

SEQ ID NO: 11988 - protein, 13 aa, Homo sapiens
ARDRGASRGAFNI

SEQ ID NO: 11989 - protein, 10 aa, Homo sapiens
QQYGSSPPIT

SEQ ID NO: 11990 - protein, 11 aa, Homo sapiens
AISSWYGFFQN

SEQ ID NO: 11991 - protein, 10 aa, Homo sapiens
QQYGSSPPIT

SEQ ID NO: 11992 - protein, 15 aa, Homo sapiens
AREGGAYYYFYGMDV

SEQ ID NO: 11993 - protein, 9 aa, Homo sapiens
QQYGSSPYT

SEQ ID NO: 11994 - protein, 13 aa, Homo sapiens
ARDRGASRGAFNI

SEQ ID NO: 11995 - protein, 9 aa, Homo sapiens
QQYGSSPYT

SEQ ID NO: 11996 - protein, 11 aa, Homo sapiens
AISSWYGFFQN

SEQ ID NO: 11997 - protein, 9 aa, Homo sapiens
QQYGSSPYT

SEQ ID NO: 11998 - protein, 15 aa, Homo sapiens
AREGGAYYYFYGMDV
